United States Patent Application Publication US 2023/0087228 A1 - sequence listing, part 13

SEQ ID NO: 1070 - DNA, 105569 bp, Artificial Sequence
  Synthetic Oligonucleotide
  misc_feature (1)..(96625): n is a, c, g, or t
nnnnnnnnnnnnnnnnnnnnnnnnnnnnnnnnnnnnnnnnnnnnnnnnnnnnnnnnnnnnnnnnnnnnnnnnnnnnnnnnnnnnnnnnnnnnnnnnnnnnnnnnnnnnnnnnnnnnnnnnnnnnnnnnnnnnnnnnnnnnnnnnnnnnnnnnnnnnnnnnnnnnnnnnnnnnnnnnnnnnnnnnnnnnnnnnnnnnnnnnnnnnnnnnnnnnnnnnnnnnnnnnnnnnnnnnnnnnnnnnnnnnnnnnnnnnnnnnnnnnnnnnnnnnnnnnnnnnnnnnnnnnnnnnnnnnnnnnnnnnnnnnnnnnnnnnnnnnnnnnnnnnnnnnnnnnnnnnnnnnnnnnnnnnnnnnnnnnnnnnnnnnnnnnnnnnnnnnnnnnnnnnnnnnnnnnnnnnnnnnnnnnnnnnnnnnnnnnnnnnnnnnnnnnnnnnnnnnnnnnnnnnnnnnnnnnnnnnnnnnnnnnnnnnnnnnnnnnnnnnnnnnnnnnnnnnnnnnnnnnnnnnnnnnnnnnnnnnnnnnnnnnnnnnnnnnnnnnnnnnnnnnnnnnnnnnnnnnnnnnnnnnnnnnnnnnnnnnnnnnnnnnnnnnnnnnnnnnnnnnnnnnnnnnnnnnnnnnnnnnnnnnnnnnnnnnnnnnnnnnnnnnnnnnnnnnnnnnnnnnnnnnnnnnnnnnnnnnnnnnnnnnnnnnnnnnnnnnnnnnnnnnnnnnnnnnnnnnnnnnnnnnnnnnnnnnnnnnnnnnnnnnnnnnnnnnnnnnnnnnnnnnnnnnnnnnnnnnnnnnnnnnnnnnnnnnnnnnnnnnnnnnnnnnnnnnnnnnnnnnnnnnnnnnnnnnnnnnnnnnnnnnnnnnnnnnnnnnnnnnnnnnnnnnnnnnnnnnnnnnnnnnnnnnnnnnnnnnnnnnnnnnnnnnnnnnnnnnnnnnnnnnnnnnnnnnnnnnnnnnnnnnnnnnnnnnnnnnnnnnnnnnnnnnnnnnnnnnnnnnnnnnnnnnnnnnnnnnnnnnnnnnnnnnnnnnnnnnnnnnnnnnnnnnnnnnnnnnnnnnnnnnnnnnnnnnnnnnnnnnnnnnnnnnnnnnnnnnnnnnnnnnnnnnnnnnnnnnnnnnnnnnnnnnnnnnnnnnnnnnnnnnnnnnnnnnnnnnnnnnnnnnnnnnnnnnnnnnnnnnnnnnnnnnnnnnnnnnnnnnnnnnnnnnnnnnnnnnnnnnnnnnnnnnnnnnnnnnnnnnnnnnnnnnnnnnnnnnnnnnnnnnnnnnnnnnnnnnnnnnnnnnnnnnnnnnnnnnnnnnnnnnnnnnnnnnnnnnnnnnnnnnnnnnnnnnnnnnnnnnnnnnnnnnnnnnnnnnnnnnnnnnnnnnnnnnnnnnnnnnnnnnnnnnnnnnnnnnnnnnnnnnnnnnnnnnnnnnnnnnnnnnnnnnnnnnnnnnnnnnnnnnnnnnnnnnnnnnnnnnnnnnnnnnnnnnnnnnnnnnnnnnnnnnnnnnnnnnnnnnnnnnnnnnnnnnnnnnnnnnnnnnnnnnnnnnnnnnnnnnnnnnnnnnnnnnnnnnnnnnnnnnnnnnnnnnnnnnnnnnnnnnnnnnnnnnnnnnnnnnnnnnnnnnnnnnnnnnnnnnnnnnnnnnnnnnnnnnnnnnnnnnnnnnnnnnnnnnnnnnnnnnnnnnnnnnnnnnnnnnnnnnnnnnnnnnnnnnnnnnnnnnnnnnnnnnnnnnnnnnnnnnnnnnnnnnnnnnnnnnnnnnnnnnnnnnnnnnnnnnnnnnnnnnnnnnnnnnnnnnnnnnnnnnnnnnnnnnnnnnnnnnnnnnnnnnnnnnnnnnnnnnnnnnnnnnnnnnnnnnnnnnnnnnnnnnnnnnnnnnnnnnnnnnnnnnnnnnnnnnnnnnnnnnnnnnnnnnnnnnnnnnnnnnnnnnnnnnnnnnnnnnnnnnnnnnnnnnnnnnnnnnnnnnnnnnnnnnnnnnnnnnnnnnnnnnnnnnnnnnnnnnnnnnnnnnnnnnnnnnnnnnnnnnnnnnnnnnnnnnnnnnnnnnnnnnnnnnnnnnnnnnnnnnnnnnnnnnnnnnnnnnnnnnnnnnnnnnnnnnnnnnnnnnnnnnnnnnnnnnnnnnnnnnnnnnnnnnnnnnnnnnnnnnnnnnnnnnnnnnnnnnnnnnnnnnnnnnnnnnnnnnnnnnnnnnnnnnnnnnnnnnnnnnnnnnnnnnnnnnnnnnnnnnnnnnnnnnnnnnnnnnnnnnnnnnnnnnnnnnnnnnnnnnnnnnnnnnnnnnnnnnnnnnnnnnnnnnnnnnnnnnnnnnnnnnnnnnnnnnnnnnnnnnnnnnnnnnnnnnnnnnnnnnnnnnnnnnnnnnnnnnnnnnnnnnnnnnnnnnnnnnnnnnnnnnnnnnnnnnnnnnnnnnnnnnnnnnnnnnnnnnnnnnnnnnnnnnnnnnnnnnnnnnnnnnnnnnnnnnnnnnnnnnnnnnnnnnnnnnnnnnnnnnnnnnnnnnnnnnnnnnnnnnnnnnnnnnnnnnnnnnnnnnnnnnnnnnnnnnnnnnnnnnnnnnnnnnnnnnnnnnnnnnnnnnnnnnnnnnnnnnnnnnnnnnnnnnnnnnnnnnnnnnnnnnnnnnnnnnnnnnnnnnnnnnnnnnnnnnnnnnnnnnnnnnnnnnnnnnnnnnnnnnnnnnnnnnnnnnnnnnnnnnnnnnnnnnnnnnnnnnnnnnnnnnnnnnnnnnnnnnnnnnnnnnnnnnnnnnnnnnnnnnnnnnnnnnnnnnnnnnnnnnnnnnnnnnnnnnnnnnnnnnnnnnnnnnnnnnnnnnnnnnnnnnnnnnnnnnnnnnnnnnnnnnnnnnnnnnnnnnnnnnnnnnnnnnnnnnnnnnnnnnnnnnnnnnnnnnnnnnnnnnnnnnnnnnnnnnnnnnnnnnnnnnnnnnnnnnnnnnnnnnnnnnnnnnnnnnnnnnnnnnnnnnnnnnnnnnnnnnnnnnnnnnnnnnnnnnnnnnnnnnnnnnnnnnnnnnnnnnnnnnnnnnnnnnnnnnnnnnnnnnnnnnnnnnnnnnnnnnnnnnnnnnnnnnnnnnnnnnnnnnnnnnnnnnnnnnnnnnnnnnnnnnnnnnnnnnnnnnnnnnnnnnnnnnnnnnnnnnnnnnnnnnnnnnnnnnnnnnnnnnnnnnnnnnnnnnnnnnnnnnnnnnnnnnnnnnnnnnnnnnnnnnnnnnnnnnnnnnnnnnnnnnnnnnnnnnnnnnnnnnnnnnnnnnnnnnnnnnnnnnnnnnnnnnnnnnnnnnnnnnnnnnnnnnnnnnnnnnnnnnnnnnnnnnnnnnnnnnnnnnnnnnnnnnnnnnnnnnnnnnnnnnnnnnnnnnnnnnnnnnnnnnnnnnnnnnnnnnnnnnnnnnnnnnnnnnnnnnnnnnnnnnnnnnnnnnnnnnnnnnnnnnnnnnnnnnnnnnnnnnnnnnnnnnnnnnnnnnnnnnnnnnnnnnnnnnnnnnnnnnnnnnnnnnnnnnnnnnnnnnnnnnnnnnnnnnnnnnnnnnnnnnnnnnnnnnnnnnnnnnnnnnnnnnnnnnnnnnnnnnnnnnnnnnnnnnnnnnnnnnnnnnnnnnnnnnnnnnnnnnnnnnnnnnnnnnnnnnnnnnnnnnnnnnnnnnnnnnnnnnnnnnnnnnnnnnnnnnnnnnnnnnnnnnnnnnnnnnnnnnnnnnnnnnnnnnnnnnnnnnnnnnnnnnnnnnnnnnnnnnnnnnnnnnnnnnnnnnnnnnnnnnnnnnnnnnnnnnnnnnnnnnnnnnnnnnnnnnnnnnnnnnnnnnnnnnnnnnnnnnnnnnnnnnnnnnnnnnnnnnnnnnnnnnnnnnnnnnnnnnnnnnnnnnnnnnnnnnnnnnnnnnnnnnnnnnnnnnnnnnnnnnnnnnnnnnnnnnnnnnnnnnnnnnnnnnnnnnnnnnnnnnnnnnnnnnnnnnnnnnnnnnnnnnnnnnnnnnnnnnnnnnnnnnnnnnnnnnnnnnnnnnnnnnnnnnnnnnnnnnnnnnnnnnnnnnnnnnnnnnnnnnnnnnnnnnnnnnnnnnnnnnnnnnnnnnnnnnnnnnnnnnnnnnnnnnnnnnnnnnnnnnnnnnnnnnnnnnnnnnnnnnnnnnnnnnnnnnnnnnnnnnnnnnnnnnnnnnnnnnnnnnnnnnnnnnnnnnnnnnnnnnnnnnnnnnnnnnnnnnnnnnnnnnnnnnnnnnnnnnnnnnnnnnnnnnnnnnnnnnnnnnnnnnnnnnnnnnnnnnnnnnnnnnnnnnnnnnnnnnnnnnnnnnnnnnnnnnnnnnnnnnnnnnnnnnnnnnnnnnnnnnnnnnnnnnnnnnnnnnnnnnnnnnnnnnnnnnnnnnnnnnnnnnnnnnnnnnnnnnnnnnnnnnnnnnnnnnnnnnnnnnnnnnnnnnnnnnnnnnnnnnnnnnnnnnnnnnnnnnnnnnnnnnnnnnnnnnnnnnnnnnnnnnnnnnnnnnnnnnnnnnnnnnnnnnnnnnnnnnnnnnnnnnnnnnnnnnnnnnnnnnnnnnnnnnnnnnnnnnnnnnnnnnnnnnnnnnnnnnnnnnnnnnnnnnnnnnnnnnnnnnnnnnnnnnnnnnnnnnnnnnnnnnnnnnnnnnnnnnnnnnnnnnnnnnnnnnnnnnnnnnnnnnnnnnnnnnnnnnnnnnnnnnnnnnnnnnnnnnnnnnnnnnnnnnnnnnnnnnnnnnnnnnnnnnnnnnnnnnnnnnnnnnnnnnnnnnnnnnnnnnnnnnnnnnnnnnnnnnnnnnnnnnnnnnnnnnnnnnnnnnnnnnnnnnnnnnnnnnnnnnnnnnnnnnnnnnnnnnnnnnnnnnnnnnnnnnnnnnnnnnnnnnnnnnnnnnnnnnnnnnnnnnnnnnnnnnnnnnnnnnnnnnnnnnnnnnnnnnnnnnnnnnnnnnnnnnnnnnnnnnnnnnnnnnnnnnnnnnnnnnnnnnnnnnnnnnnnnnnnnnnnnnnnnnnnnnnnnnnnnnnnnnnnnnnnnnnnnnnnnnnnnnnnnnnnnnnnnnnnnnnnnnnnnnnnnnnnnnnnnnnnnnnnnnnnnnnnnnnnnnnnnnnnnnnnnnnnnnnnnnnnnnnnnnnnnnnnnnnnnnnnnnnnnnnnnnnnnnnnnnnnnnnnnnnnnnnnnnnnnnnnnnnnnnnnnnnnnnnnnnnnnnnnnnnnnnnnnnnnnnnnnnnnnnnnnnnnnnnnnnnnnnnnnnnnnnnnnnnnnnnnnnnnnnnnnnnnnnnnnnnnnnnnnnnnnnnnnnnnnnnnnnnnnnnnnnnnnnnnnnnnnnnnnnnnnnnnnnnnnnnnnnnnnnnnnnnnnnnnnnnnnnnnnnnnnnnnnnnnnnnnnnnnnnnnnnnnnnnnnnnnnnnnnnnnnnnnnnnnnnnnnnnnnnnnnnnnnnnnnnnnnnnnnnnnnnnnnnnnnnnnnnnnnnnnnnnnnnnnnnnnnnnnnnnnnnnnnnnnnnnnnnnnnnnnnnnnnnnnnnnnnnnnnnnnnnnnnnnnnnnnnnnnnnnnnnnnnnnnnnnnnnnnnnnnnnnnnnnnnnnnnnnnnnnnnnnnnnnnnnnnnnnnnnnnnnnnnnnnnnnnnnnnnnnnnnnnnnnnnnnnnnnnnnnnnnnnnnnnnnnnnnnnnnnnnnnnnnnnnnnnnnnnnnnnnnnnnnnnnnnnnnnnnnnnnnnnnnnnnnnnnnnnnnnnnnnnnnnnnnnnnnnnnnnnnnnnnnnnnnnnnnnnnnnnnnnnnnnnnnnnnnnnnnnnnnnnnnnnnnnnnnnnnnnnnnnnnnnnnnnnnnnnnnnnnnnnnnnnnnnnnnnnnnnnnnnnnnnnnnnnnnnnnnnnnnnnnnnnnnnnnnnnnnnnnnnnnnnnnnnnnnnnnnnnnnnnnnnnnnnnnnnnnnnnnnnnnnnnnnnnnnnnnnnnnnnnnnnnnnnnnnnnnnnnnnnnnnnnnnnnnnnnnnnnnnnnnnnnnnnnnnnnnnnnnnnnnnnnnnnnnnnnnnnnnnnnnnnnnnnnnnnnnnnnnnnnnnnnnnnnnnnnnnnnnnnnnnnnnnnnnnnnnnnnnnnnnnnnnnnnnnnnnnnnnnnnnnnnnnnnnnnnnnnnnnnnnnnnnnnnnnnnnnnnnnnnnnnnnnnnnnnnnnnnnnnnnnnnnnnnnnnnnnnnnnnnnnnnnnnnnnnnnnnnnnnnnnnnnnnnnnnnnnnnnnnnnnnnnnnnnnnnnnnnnnnnnnnnnnnnnnnnnnnnnnnnnnnnnnnnnnnnnnnnnnnnnnnnnnnnnnnnnnnnnnnnnnnnnnnnnnnnnnnnnnnnnnnnnnnnnnnnnnnnnnnnnnnnnnnnnnnnnnnnnnnnnnnnnnnnnnnnnnnnnnnnnnnnnnnnnnnnnnnnnnnnnnnnnnnnnnnnnnnnnnnnnnnnnnnnnnnnnnnnnnnnnnnnnnnnnnnnnnnnnnnnnnnnnnnnnnnnnnnnnnnnnnnnnnnnnnnnnnnnnnnnnnnnnnnnnnnnnnnnnnnnnnnnnnnnnnnnnnnnnnnnnnnnnnnnnnnnnnnnnnnnnnnnnnnnnnnnnnnnnnnnnnnnnnnnnnnnnnnnnnnnnnnnnnnnnnnnnnnnnnnnnnnnnnnnnnnnnnnnnnnnnnnnnnnnnnnnnnnnnnnnnnnnnnnnnnnnnnnnnnnnnnnnnnnnnnnnnnnnnnnnnnnnnnnnnnnnnnnnnnnnnnnnnnnnnnnnnnnnnnnnnnnnnnnnnnnnnnnnnnnnnnnnnnnnnnnnnnnnnnnnnnnnnnnnnnnnnnnnnnnnnnnnnnnnnnnnnnnnnnnnnnnnnnnnnnnnnnnnnnnnnnnnnnnnnnnnnnnnnnnnnnnnnnnnnnnnnnnnnnnnnnnnnnnnnnnnnnnnnnnnnnnnnnnnnnnnnnnnnnnnnnnnnnnnnnnnnnnnnnnnnnnnnnnnnnnnnnnnnnnnnnnnnnnnnnnnnnnnnnnnnnnnnnnnnnnnnnnnnnnnnnnnnnnnnnnnnnnnnnnnnnnnnnnnnnnnnnnnnnnnnnnnnnnnnnnnnnnnnnnnnnnnnnnnnnnnnnnnnnnnnnnnnnnnnnnnnnnnnnnnnnnnnnnnnnnnnnnnnnnnnnnnnnnnnnnnnnnnnnnnnnnnnnnnnnnnnnnnnnnnnnnnnnnnnnnnnnnnnnnnnnnnnnnnnnnnnnnnnnnnnnnnnnnnnnnnnnnnnnnnnnnnnnnnnnnnnnnnnnnnnnnnnnnnnnnnnnnnnnnnnnnnnnnnnnnnnnnnnnnnnnnnnnnnnnnnnnnnnnnnnnnnnnnnnnnnnnnnnnnnnnnnnnnnnnnnnnnnnnnnnnnnnnnnnnnnnnnnnnnnnnnnnnnnnnnnnnnnnnnnnnnnnnnnnnnnnnnnnnnnnnnnnnnnnnnnnnnnnnnnnnnnnnnnnnnnnnnnnnnnnnnnnnnnnnnnnnnnnnnnnnnnnnnnnnnnnnnnnnnnnnnnnnnnnnnnnnnnnnnnnnnnnnnnnnnnnnnnnnnnnnnnnnnnnnnnnnnnnnnnnnnnnnnnnnnnnnnnnnnnnnnnnnnnnnnnnnnnnnnnnnnnnnnnnnnnnnnnnnnnnnnnnnnnnnnnnnnnnnnnnnnnnnnnnnnnnnnnnnnnnnnnnnnnnnnnnnnnnnnnnnnnnnnnnnnnnnnnnnnnnnnnnnnnnnnnnnnnnnnnnnnnnnnnnnnnnnnnnnnnnnnnnnnnnnnnnnnnnnnnnnnnnnnnnnnnnnnnnnnnnnnnnnnnnnnnnnnnnnnnnnnnnnnnnnnnnnnnnnnnnnnnnnnnnnnnnnnnnnnnnnnnnnnnnnnnnnnnnnnnnnnnnnnnnnnnnnnnnnnnnnnnnnnnnnnnnnnnnnnnnnnnnnnnnnnnnnnnnnnnnnnnnnnnnnnnnnnnnnnnnnnnnnnnnnnnnnnnnnnnnnnnnnnnnnnnnnnnnnnnnnnnnnnnnnnnnnnnnnnnnnnnnnnnnnnnnnnnnnnnnnnnnnnnnnnnnnnnnnnnnnnnnnnnnnnnnnnnnnnnnnnnnnnnnnnnnnnnnnnnnnnnnnnnnnnnnnnnnnnnnnnnnnnnnnnnnnnnnnnnnnnnnnnnnnnnnnnnnnnnnnnnnnnnnnnnnnnnnnnnnnnnnnnnnnnnnnnnnnnnnnnnnnnnnnnnnnnnnnnnnnnnnnnnnnnnnnnnnnnnnnnnnnnnnnnnnnnnnnnnnnnnnnnnnnnnnnnnnnnnnnnnnnnnnnnnnnnnnnnnnnnnnnnnnnnnnnnnnnnnnnnnnnnnnnnnnnnnnnnnnnnnnnnnnnnnnnnnnnnnnnnnnnnnnnnnnnnnnnnnnnnnnnnnnnnnnnnnnnnnnnnnnnnnnnnnnnnnnnnnnnnnnnnnnnnnnnnnnnnnnnnnnnnnnnnnnnnnnnnnnnnnnnnnnnnnnnnnnnnnnnnnnnnnnnnnnnnnnnnnnnnnnnnnnnnnnnnnnnnnnnnnnnnnnnnnnnnnnnnnnnnnnnnnnnnnnnnnnnnnnnnnnnnnnnnnnnnnnnnnnnnnnnnnnnnnnnnnnnnnnnnnnnnnnnnnnnnnnnnnnnnnnnnnnnnnnnnnnnnnnnnnnnnnnnnnnnnnnnnnnnnnnnnnnnnnnnnnnnnnnnnnnnnnnnnnnnnnnnnnnnnnnnnnnnnnnnnnnnnnnnnnnnnnnnnnnnnnnnnnnnnnnnnnnnnnnnnnnnnnnnnnnnnnnnnnnnnnnnnnnnnnnnnnnnnnnnnnnnnnnnnnnnnnnnnnnnnnnnnnnnnnnnnnnnnnnnnnnnnnnnnnnnnnnnnnnnnnnnnnnnnnnnnnnnnnnnnnnnnnnnnnnnnnnnnnnnnnnnnnnnnnnnnnnnnnnnnnnnnnnnnnnnnnnnnnnnnnnnnnnnnnnnnnnnnnnnnnnnnnnnnnnnnnnnnnnnnnnnnnnnnnnnnnnnnnnnnnnnnnnnnnnnnnnnnnnnnnnnnnnnnnnnnnnnnnnnnnnnnnnnnnnnnnnnnnnnnnnnnnnnnnnnnnnnnnnnnnnnnnnnnnnnnnnnnnnnnnnnnnnnnnnnnnnnnnnnnnnnnnnnnnnnnnnnnnnnnnnnnnnnnnnnnnnnnnnnnnnnnnnnnnnnnnnnnnnnnnnnnnnnnnnnnnnnnnnnnnnnnnnnnnnnnnnnnnnnnnnnnnnnnnnnnnnnnnnnnnnnnnnnnnnnnnnnnnnnnnnnnnnnnnnnnnnnnnnnnnnnnnnnnnnnnnnnnnnnnnnnnnnnnnnnnnnnnnnnnnnnnnnnnnnnnnnnnnnnnnnnnnnnnnnnnnnnnnnnnnnnnnnnnnnnnnnnnnnnnnnnnnnnnnnnnnnnnnnnnnnnnnnnnnnnnnnnnnnnnnnnnnnnnnnnnnnnnnnnnnnnnnnnnnnnnnnnnnnnnnnnnnnnnnnnnnnnnnnnnnnnnnnnnnnnnnnnnnnnnnnnnnnnnnnnnnnnnnnnnnnnnnnnnnnnnnnnnnnnnnnnnnnnnnnnnnnnnnnnnnnnnnnnnnnnnnnnnnnnnnnnnnnnnnnnnnnnnnnnnnnnnnnnnnnnnnnnnnnnnnnnnnnnnnnnnnnnnnnnnnnnnnnnnnnnnnnnnnnnnnnnnnnnnnnnnnnnnnnnnnnnnnnnnnnnnnnnnnnnnnnnnnnnnnnnnnnnnnnnnnnnnnnnnnnnnnnnnnnnnnnnnnnnnnnnnnnnnnnnnnnnnnnnnnnnnnnnnnnnnnnnnnnnnnnnnnnnnnnnnnnnnnnnnnnnnnnnnnnnnnnnnnnnnnnnnnnnnnnnnnnnnnnnnnnnnnnnnnnnnnnnnnnnnnnnnnnnnnnnnnnnnnnnnnnnnnnnnnnnnnnnnnnnnnnnnnnnnnnnnnnnnnnnnnnnnnnnnnnnnnnnnnnnnnnnnnnnnnnnnnnnnnnnnnnnnnnnnnnnnnnnnnnnnnnnnnnnnnnnnnnnnnnnnnnnnnnnnnnnnnnnnnnnnnnnnnnnnnnnnnnnnnnnnnnnnnnnnnnnnnnnnnnnnnnnnnnnnnnnnnnnnnnnnnnnnnnnnnnnnnnnnnnnnnnnnnnnnnnnnnnnnnnnnnnnnnnnnnnnnnnnnnnnnnnnnnnnnnnnnnnnnnnnnnnnnnnnnnnnnnnnnnnnnnnnnnnnnnnnnnnnnnnnnnnnnnnnnnnnnnnnnnnnnnnnnnnnnnnnnnnnnnnnnnnnnnnnnnnnnnnnnnnnnnnnnnnnnnnnnnnnnnnnnnnnnnnnnnnnnnnnnnnnnnnnnnnnnnnnnnnnnnnnnnnnnnnnnnnnnnnnnnnnnnnnnnnnnnnnnnnnnnnnnnnnnnnnnnnnnnnnnnnnnnnnnnnnnnnnnnnnnnnnnnnnnnnnnnnnnnnnnnnnnnnnnnnnnnnnnnnnnnnnnnnnnnnnnnnnnnnnnnnnnnnnnnnnnnnnnnnnnnnnnnnnnnnnnnnnnnnnnnnnnnnnnnnnnnnnnnnnnnnnnnnnnnnnnnnnnnnnnnnnnnnnnnnnnnnnnnnnnnnnnnnnnnnnnnnnnnnnnnnnnnnnnnnnnnnnnnnnnnnnnnnnnnnnnnnnnnnnnnnnnnnnnnnnnnnnnnnnnnnnnnnnnnnnnnnnnnnnnnnnnnnnnnnnnnnnnnnnnnnnnnnnnnnnnnnnnnnnnnnnnnnnnnnnnnnnnnnnnnnnnnnnnnnnnnnnnnnnnnnnnnnnnnnnnnnnnnnnnnnnnnnnnnnnnnnnnnnnnnnnnnnnnnnnnnnnnnnnnnnnnnnnnnnnnnnnnnnnnnnnnnnnnnnnnnnnnnnnnnnnnnnnnnnnnnnnnnnnnnnnnnnnnnnnnnnnnnnnnnnnnnnnnnnnnnnnnnnnnnnnnnnnnnnnnnnnnnnnnnnnnnnnnnnnnnnnnnnnnnnnnnnnnnnnnnnnnnnnnnnnnnnnnnnnnnnnnnnnnnnnnnnnnnnnnnnnnnnnnnnnnnnnnnnnnnnnnnnnnnnnnnnnnnnnnnnnnnnnnnnnnnnnnnnnnnnnnnnnnnnnnnnnnnnnnnnnnnnnnnnnnnnnnnnnnnnnnnnnnnnnnnnnnnnnnnnnnnnnnnnnnnnnnnnnnnnnnnnnnnnnnnnnnnnnnnnnnnnnnnnnnnnnnnnnnnnnnnnnnnnnnnnnnnnnnnnnnnnnnnnnnnnnnnnnnnnnnnnnnnnnnnnnnnnnnnnnnnnnnnnnnnnnnnnnnnnnnnnnnnnnnnnnnnnnnnnnnnnnnnnnnnnnnnnnnnnnnnnnnnnnnnnnnnnnnnnnnnnnnnnnnnnnnnnnnnnnnnnnnnnnnnnnnnnnnnnnnnnnnnnnnnnnnnnnnnnnnnnnnnnnnnnnnnnnnnnnnnnnnnnnnnnnnnnnnnnnnnnnnnnnnnnnnnnnnnnnnnnnnnnnnnnnnnnnnnnnnnnnnnnnnnnnnnnnnnnnnnnnnnnnnnnnnnnnnnnnnnnnnnnnnnnnnnnnnnnnnnnnnnnnnnnnnnnnnnnnnnnnnnnnnnnnnnnnnnnnnnnnnnnnnnnnnnnnnnnnnnnnnnnnnnnnnnnnnnnnnnnnnnnnnnnnnnnnnnnnnnnnnnnnnnnnnnnnnnnnnnnnnnnnnnnnnnnnnnnnnnnnnnnnnnnnnnnnnnnnnnnnnnnnnnnnnnnnnnnnnnnnnnnnnnnnnnnnnnnnnnnnnnnnnnnnnnnnnnnnnnnnnnnnnnnnnnnnnnnnnnnnnnnnnnnnnnnnnnnnnnnnnnnnnnnnnnnnnnnnnnnnnnnnnnnnnnnnnnnnnnnnnnnnnnnnnnnnnnnnnnnnnnnnnnnnnnnnnnnnnnnnnnnnnnnnnnnnnnnnnnnnnnnnnnnnnnnnnnnnnnnnnnnnnnnnnnnnnnnnnnnnnnnnnnnnnnnnnnnnnnnnnnnnnnnnnnnnnnnnnnnnnnnnnnnnnnnnnnnnnnnnnnnnnnnnnnnnnnnnnnnnnnnnnnnnnnnnnnnnnnnnnnnnnnnnnnnnnnnnnnnnnnnnnnnnnnnnnnnnnnnnnnnnnnnnnnnnnnnnnnnnnnnnnnnnnnnnnnnnnnnnnnnnnnnnnnnnnnnnnnnnnnnnnnnnnnnnnnnnnnnnnnnnnnnnnnnnnnnnnnnnnnnnnnnnnnnnnnnnnnnnnnnnnnnnnnnnnnnnnnnnnnnnnnnnnnnnnnnnnnnnnnnnnnnnnnnnnnnnnnnnnnnnnnnnnnnnnnnnnnnnnnnnnnnnnnnnnnnnnnnnnnnnnnnnnnnnnnnnnnnnnnnnnnnnnnnnnnnnnnnnnnnnnnnnnnnnnnnnnnnnnnnnnnnnnnnnnnnnnnnnnnnnnnnnnnnnnnnnnnnnnnnnnnnnnnnnnnnnnnnnnnnnnnnnnnnnnnnnnnnnnnnnnnnnnnnnnnnnnnnnnnnnnnnnnnnnnnnnnnnnnnnnnnnnnnnnnnnnnnnnnnnnnnnnnnnnnnnnnnnnnnnnnnnnnnnnnnnnnnnnnnnnnnnnnnnnnnnnnnnnnnnnnnnnnnnnnnnnnnnnnnnnnnnnnnnnnnnnnnnnnnnnnnnnnnnnnnnnnnnnnnnnnnnnnnnnnnnnnnnnnnnnnnnnnnnnnnnnnnnnnnnnnnnnnnnnnnnnnnnnnnnnnnnnnnnnnnnnnnnnnnnnnnnnnnnnnnnnnnnnnnnnnnnnnnnnnnnnnnnnnnnnnnnnnnnnnnnnnnnnnnnnnnnnnnnnnnnnnnnnnnnnnnnnnnnnnnnnnnnnnnnnnnnnnnnnnnnnnnnnnnnnnnnnnnnnnnnnnnnnnnnnnnnnnnnnnnnnnnnnnnnnnnnnnnnnnnnnnnnnnnnnnnnnnnnnnnnnnnnnnnnnnnnnnnnnnnnnnnnnnnnnnnnnnnnnnnnnnnnnnnnnnnnnnnnnnnnnnnnnnnnnnnnnnnnnnnnnnnnnnnnnnnnnnnnnnnnnnnnnnnnnnnnnnnnnnnnnnnnnnnnnnnnnnnnnnnnnnnnnnnnnnnnnnnnnnnnnnnnnnnnnnnnnnnnnnnnnnnnnnnnnnnnnnnnnnnnnnnnnnnnnnnnnnnnnnnnnnnnnnnnnnnnnnnnnnnnnnnnnnnnnnnnnnnnnnnnnnnnnnnnnnnnnnnnnnnnnnnnnnnnnnnnnnnnnnnnnnnnnnnnnnnnnnnnnnnnnnnnnnnnnnnnnnnnnnnnnnnnnnnnnnnnnnnnnnnnnnnnnnnnnnnnnnnnnnnnnnnnnnnnnnnnnnnnnnnnnnnnnnnnnnnnnnnnnnnnnnnnnnnnnnnnnnnnnnnnnnnnnnnnnnnnnnnnnnnnnnnnnnnnnnnnnnnnnnnnnnnnnnnnnnnnnnnnnnnnnnnnnnnnnnnnnnnnnnnnnnnnnnnnnnnnnnnnnnnnnnnnnnnnnnnnnnnnnnnnnnnnnnnnnnnnnnnnnnnnnnnnnnnnnnnnnnnnnnnnnnnnnnnnnnnnnnnnnnnnnnnnnnnnnnnnnnnnnnnnnnnnnnnnnnnnnnnnnnnnnnnnnnnnnnnnnnnnnnnnnnnnnnnnnnnnnnnnnnnnnnnnnnnnnnnnnnnnnnnnnnnnnnnnnnnnnnnnnnnnnnnnnnnnnnnnnnnnnnnnnnnnnnnnnnnnnnnnnnnnnnnnnnnnnnnnnnnnnnnnnnnnnnnnnnnnnnnnnnnnnnnnnnnnnnnnnnnnnnnnnnnnnnnnnnnnnnnnnnnnnnnnnnnnnnnnnnnnnnnnnnnnnnnnnnnnnnnnnnnnnnnnnnnnnnnnnnnnnnnnnnnnnnnnnnnnnnnnnnnnnnnnnnnnnnnnnnnnnnnnnnnnnnnnnnnnnnnnnnnnnnnnnnnnnnnnnnnnnnnnnnnnnnnnnnnnnnnnnnnnnnnnnnnnnnnnnnnnnnnnnnnnnnnnnnnnnnnnnnnnnnnnnnnnnnnnnnnnnnnnnnnnnnnnnnnnnnnnnnnnnnnnnnnnnnnnnnnnnnnnnnnnnnnnnnnnnnnnnnnnnnnnnnnnnnnnnnnnnnnnnnnnnnnnnnnnnnnnnnnnnnnnnnnnnnnnnnnnnnnnnnnnnnnnnnnnnnnnnnnnnnnnnnnnnnnnnnnnnnnnnnnnnnnnnnnnnnnnnnnnnnnnnnnnnnnnnnnnnnnnnnnnnnnnnnnnnnnnnnnnnnnnnnnnnnnnnnnnnnnnnnnnnnnnnnnnnnnnnnnnnnnnnnnnnnnnnnnnnnnnnnnnnnnnnnnnnnnnnnnnnnnnnnnnnnnnnnnnnnnnnnnnnnnnnnnnnnnnnnnnnnnnnnnnnnnnnnnnnnnnnnnnnnnnnnnnnnnnnnnnnnnnnnnnnnnnnnnnnnnnnnnnnnnnnnnnnnnnnnnnnnnnnnnnnnnnnnnnnnnnnnnnnnnnnnnnnnnnnnnnnnnnnnnnnnnnnnnnnnnnnnnnnnnnnnnnnnnnnnnnnnnnnnnnnnnnnnnnnnnnnnnnnnnnnnnnnnnnnnnnnnnnnnnnnnnnnnnnnnnnnnnnnnnnnnnnnnnnnnnnnnnnnnnnnnnnnnnnnnnnnnnnnnnnnnnnnnnnnnnnnnnnnnnnnnnnnnnnnnnnnnnnnnnnnnnnnnnnnnnnnnnnnnnnnnnnnnnnnnnnnnnnnnnnnnnnnnnnnnnnnnnnnnnnnnnnnnnnnnnnnnnnnnnnnnnnnnnnnnnnnnnnnnnnnnnnnnnnnnnnnnnnnnnnnnnnnnnnnnnnnnnnnnnnnnnnnnnnnnnnnnnnnnnnnnnnnnnnnnnnnnnnnnnnnnnnnnnnnnnnnnnnnnnnnnnnnnnnnnnnnnnnnnnnnnnnnnnnnnnnnnnnnnnnnnnnnnnnnnnnnnnnnnnnnnnnnnnnnnnnnnnnnnnnnnnnnnnnnnnnnnnnnnnnnnnnnnnnnnnnnnnnnnnnnnnnnnnnnnnnnnnnnnnnnnnnnnnnnnnnnnnnnnnnnnnnnnnnnnnnnnnnnnnnnnnnnnnnnnnnnnnnnnnnnnnnnnnnnnnnnnnnnnnnnnnnnnnnnnnnnnnnnnnnnnnnnnnnnnnnnnnnnnnnnnnnnnnnnnnnnnnnnnnnnnnnnnnnnnnnnnnnnnnnnnnnnnnnnnnnnnnnnnnnnnnnnnnnnnnnnnnnnnnnnnnnnnnnnnnnnnnnnnnnnnnnnnnnnnnnnnnnnnnnnnnnnnnnnnnnnnnnnnnnnnnnnnnnnnnnnnnnnnnnnnnnnnnnnnnnnnnnnnnnnnnnnnnnnnnnnnnnnnnnnnnnnnnnnnnnnnnnnnnnnnnnnnnnnnnnnnnnnnnnnnnnnnnnnnnnnnnnnnnnnnnnnnnnnnnnnnnnnnnnnnnnnnnnnnnnnnnnnnnnnnnnnnnnnnnnnnnnnnnnnnnnnnnnnnnnnnnnnnnnnnnnnnnnnnnnnnnnnnnnnnnnnnnnnnnnnnnnnnnnnnnnnnnnnnnnnnnnnnnnnnnnnnnnnnnnnnnnnnnnnnnnnnnnnnnnnnnnnnnnnnnnnnnnnnnnnnnnnnnnnnnnnnnnnnnnnnnnnnnnnnnnnnnnnnnnnnnnnnnnnnnnnnnnnnnnnnnnnnnnnnnnnnnnnnnnnnnnnnnnnnnnnnnnnnnnnnnnnnnnnnnnnnnnnnnnnnnnnnnnnnnnnnnnnnnnnnnnnnnnnnnnnnnnnnnnnnnnnnnnnnnnnnnnnnnnnnnnnnnnnnnnnnnnnnnnnnnnnnnnnnnnnnnnnnnnnnnnnnnnnnnnnnnnnnnnnnnnnnnnnnnnnnnnnnnnnnnnnnnnnnnnnnnnnnnnnnnnnnnnnnnnnnnnnnnnnnnnnnnnnnnnnnnnnnnnnnnnnnnnnnnnnnnnnnnnnnnnnnnnnnnnnnnnnnnnnnnnnnnnnnnnnnnnnnnnnnnnnnnnnnnnnnnnnnnnnnnnnnnnnnnnnnnnnnnnnnnnnnnnnnnnnnnnnnnnnnnnnnnnnnnnnnnnnnnnnnnnnnnnnnnnnnnnnnnnnnnnnnnnnnnnnnnnnnnnnnnnnnnnnnnnnnnnnnnnnnnnnnnnnnnnnnnnnnnnnnnnnnnnnnnnnnnnnnnnnnnnnnnnnnnnnnnnnnnnnnnnnnnnnnnnnnnnnnnnnnnnnnnnnnnnnnnnnnnnnnnnnnnnnnnnnnnnnnnnnnnnnnnnnnnnnnnnnnnnnnnnnnnnnnnnnnnnnnnnnnnnnnnnnnnnnnnnnnnnnnnnnnnnnnnnnnnnnnnnnnnnnnnnnnnnnnnnnnnnnnnnnnnnnnnnnnnnnnnnnnnnnnnnnnnnnnnnnnnnnnnnnnnnnnnnnnnnnnnnnnnnnnnnnnnnnnnnnnnnnnnnnnnnnnnnnnnnnnnnnnnnnnnnnnnnnnnnnnnnnnnnnnnnnnnnnnnnnnnnnnnnnnnnnnnnnnnnnnnnnnnnnnnnnnnnnnnnnnnnnnnnnnnnnnnnnnnnnnnnnnnnnnnnnnnnnnnnnnnnnnnnnnnnnnnnnnnnnnnnnnnnnnnnnnnnnnnnnnnnnnnnnnnnnnnnnnnnnnnnnnnnnnnnnnnnnnnnnnnnnnnnnnnnnnnnnnnnnnnnnnnnnnnnnnnnnnnnnnnnnnnnnnnnnnnnnnnnnnnnnnnnnnnnnnnnnnnnnnnnnnnnnnnnnnnnnnnnnnnnnnnnnnnnnnnnnnnnnnnnnnnnnnnnnnnnnnnnnnnnnnnnnnnnnnnnnnnnnnnnnnnnnnnnnnnnnnnnnnnnnnnnnnnnnnnnnnnnnnnnnnnnnnnnnnnnnnnnnnnnnnnnnnnnnnnnnnnnnnnnnnnnnnnnnnnnnnnnnnnnnnnnnnnnnnnnnnnnnnnnnnnnnnnnnnnnnnnnnnnnnnnnnnnnnnnnnnnnnnnnnnnnnnnnnnnnnnnnnnnnnnnnnnnnnnnnnnnnnnnnnnnnnnnnnnnnnnnnnnnnnnnnnnnnnnnnnnnnnnnnnnnnnnnnnnnnnnnnnnnnnnnnnnnnnnnnnnnnnnnnnnnnnnnnnnnnnnnnnnnnnnnnnnnnnnnnnnnnnnnnnnnnnnnnnnnnnnnnnnnnnnnnnnnnnnnnnnnnnnnnnnnnnnnnnnnnnnnnnnnnnnnnnnnnnnnnnnnnnnnnnnnnnnnnnnnnnnnnnnnnnnnnnnnnnnnnnnnnnnnnnnnnnnnnnnnnnnnnnnnnnnnnnnnnnnnnnnnnnnnnnnnnnnnnnnnnnnnnnnnnnnnnnnnnnnnnnnnnnnnnnnnnnnnnnnnnnnnnnnnnnnnnnnnnnnnnnnnnnnnnnnnnnnnnnnnnnnnnnnnnnnnnnnnnnnnnnnnnnnnnnnnnnnnnnnnnnnnnnnnnnnnnnnnnnnnnnnnnnnnnnnnnnnnnnnnnnnnnnnnnnnnnnnnnnnnnnnnnnnnnnnnnnnnnnnnnnnnnnnnnnnnnnnnnnnnnnnnnnnnnnnnnnnnnnnnnnnnnnnnnnnnnnnnnnnnnnnnnnnnnnnnnnnnnnnnnnnnnnnnnnnnnnnnnnnnnnnnnnnnnnnnnnnnnnnnnnnnnnnnnnnnnnnnnnnnnnnnnnnnnnnnnnnnnnnnnnnnnnnnnnnnnnnnnnnnnnnnnnnnnnnnnnnnnnnnnnnnnnnnnnnnnnnnnnnnnnnnnnnnnnnnnnnnnnnnnnnnnnnnnnnnnnnnnnnnnnnnnnnnnnnnnnnnnnnnnnnnnnnnnnnnnnnnnnnnnnnnnnnnnnnnnnnnnnnnnnnnnnnnnnnnnnnnnnnnnnnnnnnnnnnnnnnnnnnnnnnnnnnnnnnnnnnnnnnnnnnnnnnnnnnnnnnnnnnnnnnnnnnnnnnnnnnnnnnnnnnnnnnnnnnnnnnnnnnnnnnnnnnnnnnnnnnnnnnnnnnnnnnnnnnnnnnnnnnnnnnnnnnnnnnnnnnnnnnnnnnnnnnnnnnnnnnnnnnnnnnnnnnnnnnnnnnnnnnnnnnnnnnnnnnnnnnnnnnnnnnnnnnnnnnnnnnnnnnnnnnnnnnnnnnnnnnnnnnnnnnnnnnnnnnnnnnnnnnnnnnnnnnnnnnnnnnnnnnnnnnnnnnnnnnnnnnnnnnnnnnnnnnnnnnnnnnnnnnnnnnnnnnnnnnnnnnnnnnnnnnnnnnnnnnnnnnnnnnnnnnnnnnnnnnnnnnnnnnnnnnnnnnnnnnnnnnnnnnnnnnnnnnnnnnnnnnnnnnnnnnnnnnnnnnnnnnnnnnnnnnnnnnnnnnnnnnnnnnnnnnnnnnnnnnnnnnnnnnnnnnnnnnnnnnnnnnnnnnnnnnnnnnnnnnnnnnnnnnnnnnnnnnnnnnnnnnnnnnnnnnnnnnnnnnnnnnnnnnnnnnnnnnnnnnnnnnnnnnnnnnnnnnnnnnnnnnnnnnnnnnnnnnnnnnnnnnnnnnnnnnnnnnnnnnnnnnnnnnnnnnnnnnnnnnnnnnnnnnnnnnnnnnnnnnnnnnnnnnnnnnnnnnnnnnnnnnnnnnnnnnnnnnnnnnnnnnnnnnnnnnnnnnnnnnnnnnnnnnnnnnnnnnnnnnnnnnnnnnnnnnnnnnnnnnnnnnnnnnnnnnnnnnnnnnnnnnnnnnnnnnnnnnnnnnnnnnnnnnnnnnnnnnnnnnnnnnnnnnnnnnnnnnnnnnnnnnnnnnnnnnnnnnnnnnnnnnnnnnnnnnnnnnnnnnnnnnnnnnnnnnnnnnnnnnnnnnnnnnnnnnnnnnnnnnnnnnnnnnnnnnnnnnnnnnnnnnnnnnnnnnnnnnnnnnnnnnnnnnnnnnnnnnnnnnnnnnnnnnnnnnnnnnnnnnnnnnnnnnnnnnnnnnnnnnnnnnnnnnnnnnnnnnnnnnnnnnnnnnnnnnnnnnnnnnnnnnnnnnnnnnnnnnnnnnnnnnnnnnnnnnnnnnnnnnnnnnnnnnnnnnnnnnnnnnnnnnnnnnnnnnnnnnnnnnnnnnnnnnnnnnnnnnnnnnnnnnnnnnnnnnnnnnnnnnnnnnnnnnnnnnnnnnnnnnnnnnnnnnnnnnnnnnnnnnnnnnnnnnnnnnnnnnnnnnnnnnnnnnnnnnnnnnnnnnnnnnnnnnnnnnnnnnnnnnnnnnnnnnnnnnnnnnnnnnnnnnnnnnnnnnnnnnnnnnnnnnnnnnnnnnnnnnnnnnnnnnnnnnnnnnnnnnnnnnnnnnnnnnnnnnnnnnnnnnnnnnnnnnnnnnnnnnnnnnnnnnnnnnnnnnnnnnnnnnnnnnnnnnnnnnnnnnnnnnnnnnnnnnnnnnnnnnnnnnnnnnnnnnnnnnnnnnnnnnnnnnnnnnnnnnnnnnnnnnnnnnnnnnnnnnnnnnnnnnnnnnnnnnnnnnnnnnnnnnnnnnnnnnnnnnnnnnnnnnnnnnnnnnnnnnnnnnnnnnnnnnnnnnnnnnnnnnnnnnnnnnnnnnnnnnnnnnnnnnnnnnnnnnnnnnnnnnnnnnnnnnnnnnnnnnnnnnnnnnnnnnnnnnnnnnnnnnnnnnnnnnnnnnnnnnnnnnnnnnnnnnnnnnnnnnnnnnnnnnnnnnnnnnnnnnnnnnnnnnnnnnnnnnnnnnnnnnnnnnnnnnnnnnnnnnnnnnnnnnnnnnnnnnnnnnnnnnnnnnnnnnnnnnnnnnnnnnnnnnnnnnnnnnnnnnnnnnnnnnnnnnnnnnnnnnnnnnnnnnnnnnnnnnnnnnnnnnnnnnnnnnnnnnnnnnnnnnnnnnnnnnnnnnnnnnnnnnnnnnnnnnnnnnnnnnnnnnnnnnnnnnnnnnnnnnnnnnnnnnnnnnnnnnnnnnnnnnnnnnnnnnnnnnnnnnnnnnnnnnnnnnnnnnnnnnnnnnnnnnnnnnnnnnnnnnnnnnnnnnnnnnnnnnnnnnnnnnnnnnnnnnnnnnnnnnnnnnnnnnnnnnnnnnnnnnnnnnnnnnnnnnnnnnnnnnnnnnnnnnnnnnnnnnnnnnnnnnnnnnnnnnnnnnnnnnnnnnnnnnnnnnnnnnnnnnnnnnnnnnnnnnnnnnnnnnnnnnnnnnnnnnnnnnnnnnnnnnnnnnnnnnnnnnnnnnnnnnnnnnnnnnnnnnnnnnnnnnnnnnnnnnnnnnnnnnnnnnnnnnnnnnnnnnnnnnnnnnnnnnnnnnnnnnnnnnnnnnnnnnnnnnnnnnnnnnnnnnnnnnnnnnnnnnnnnnnnnnnnnnnnnnnnnnnnnnnnnnnnnnnnnnnnnnnnnnnnnnnnnnnnnnnnnnnnnnnnnnnnnnnnnnnnnnnnnnnnnnnnnnnnnnnnnnnnnnnnnnnnnnnnnnnnnnnnnnnnnnnnnnnnnnnnnnnnnnnnnnnnnnnnnnnnnnnnnnnnnnnnnnnnnnnnnnnnnnnnnnnnnnnnnnnnnnnnnnnnnnnnnnnnnnnnnnnnnnnnnnnnnnnnnnnnnnnnnnnnnnnnnnnnnnnnnnnnnnnnnnnnnnnnnnnnnnnnnnnnnnnnnnnnnnnnnnnnnnnnnnnnnnnnnnnnnnnnnnnnnnnnnnnnnnnnnnnnnnnnnnnnnnnnnnnnnnnnnnnnnnnnnnnnnnnnnnnnnnnnnnnnnnnnnnnnnnnnnnnnnnnnnnnnnnnnnnnnnnnnnnnnnnnnnnnnnnnnnnnnnnnnnnnnnnnnnnnnnnnnnnnnnnnnnnnnnnnnnnnnnnnnnnnnnnnnnnnnnnnnnnnnnnnnnnnnnnnnnnnnnnnnnnnnnnnnnnnnnnnnnnnnnnnnnnnnnnnnnnnnnnnnnnnnnnnnnnnnnnnnnnnnnnnnnnnnnnnnnnnnnnnnnnnnnnnnnnnnnnnnnnnnnnnnnnnnnnnnnnnnnnnnnnnnnnnnnnnnnnnnnnnnnnnnnnnnnnnnnnnnnnnnnnnnnnnnnnnnnnnnnnnnnnnnnnnnnnnnnnnnnnnnnnnnnnnnnnnnnnnnnnnnnnnnnnnnnnnnnnnnnnnnnnnnnnnnnnnnnnnnnnnnnnnnnnnnnnnnnnnnnnnnnnnnnnnnnnnnnnnnnnnnnnnnnnnnnnnnnnnnnnnnnnnnnnnnnnnnnnnnnnnnnnnnnnnnnnnnnnnnnnnnnnnnnnnnnnnnnnnnnnnnnnnnnnnnnnnnnnnnnnnnnnnnnnnnnnnnnnnnnnnnnnnnnnnnnnnnnnnnnnnnnnnnnnnnnnnnnnnnnnnnnnnnnnnnnnnnnnnnnnnnnnnnnnnnnnnnnnnnnnnnnnnnnnnnnnnnnnnnnnnnnnnnnnnnnnnnnnnnnnnnnnnnnnnnnnnnnnnnnnnnnnnnnnnnnnnnnnnnnnnnnnnnnnnnnnnnnnnnnnnnnnnnnnnnnnnnnnnnnnnnnnnnnnnnnnnnnnnnnnnnnnnnnnnnnnnnnnnnnnnnnnnnnnnnnnnnnnnnnnnnnnnnnnnnnnnnnnnnnnnnnnnnnnnnnnnnnnnnnnnnnnnnnnnnnnnnnnnnnnnnnnnnnnnnnnnnnnnnnnnnnnnnnnnnnnnnnnnnnnnnnnnnnnnnnnnnnnnnnnnnnnnnnnnnnnnnnnnnnnnnnnnnnnnnnnnnnnnnnnnnnnnnnnnnnnnnnnnnnnnnnnnnnnnnnnnnnnnnnnnnnnnnnnnnnnnnnnnnnnnnnnnnnnnnnnnnnnnnnnnnnnnnnnnnnnnnnnnnnnnnnnnnnnnnnnnnnnnnnnnnnnnnnnnnnnnnnnnnnnnnnnnnnnnnnnnnnnnnnnnnnnnnnnnnnnnnnnnnnnnnnnnnnnnnnnnnnnnnnnnnnnnnnnnnnnnnnnnnnnnnnnnnnnnnnnnnnnnnnnnnnnnnnnnnnnnnnnnnnnnnnnnnnnnnnnnnnnnnnnnnnnnnnnnnnnnnnnnnnnnnnnnnnnnnnnnnnnnnnnnnnnnnnnnnnnnnnnnnnnnnnnnnnnnnnnnnnnnnnnnnnnnnnnnnnnnnnnnnnnnnnnnnnnnnnnnnnnnnnnnnnnnnnnnnnnnnnnnnnnnnnnnnnnnnnnnnnnnnnnnnnnnnnnnnnnnnnnnnnnnnnnnnnnnnnnnnnnnnnnnnnnnnnnnnnnnnnnnnnnnnnnnnnnnnnnnnnnnnnnnnnnnnnnnnnnnnnnnnnnnnnnnnnnnnnnnnnnnnnnnnnnnnnnnnnnnnnnnnnnnnnnnnnnnnnnnnnnnnnnnnnnnnnnnnnnnnnnnnnnnnnnnnnnnnnnnnnnnnnnnnnnnnnnnnnnnnnnnnnnnnnnnnnnnnnnnnnnnnnnnnnnnnnnnnnnnnnnnnnnnnnnnnnnnnnnnnnnnnnnnnnnnnnnnnnnnnnnnnnnnnnnnnnnnnnnnnnnnnnnnnnnnnnnnnnnnnnnnnnnnnnnnnnnnnnnnnnnnnnnnnnnnnnnnnnnnnnnnnnnnnnnnnnnnnnnnnnnnnnnnnnnnnnnnnnnnnnnnnnnnnnnnnnnnnnnnnnnnnnnnnnnnnnnnnnnnnnnnnnnnnnnnnnnnnnnnnnnnnnnnnnnnnnnnnnnnnnnnnnnnnnnnnnnnnnnnnnnnnnnnnnnnnnnnnnnnnnnnnnnnnnnnnnnnnnnnnnnnnnnnnnnnnnnnnnnnnnnnnnnnnnnnnnnnnnnnnnnnnnnnnnnnnnnnnnnnnnnnnnnnnnnnnnnnnnnnnnnnnnnnnnnnnnnnnnnnnnnnnnnnnnnnnnnnnnnnnnnnnnnnnnnnnnnnnnnnnnnnnnnnnnnnnnnnnnnnnnnnnnnnnnnnnnnnnnnnnnnnnnnnnnnnnnnnnnnnnnnnnnnnnnnnnnnnnnnnnnnnnnnnnnnnnnnnnnnnnnnnnnnnnnnnnnnnnnnnnnnnnnnnnnnnnnnnnnnnnnnnnnnnnnnnnnnnnnnnnnnnnnnnnnnnnnnnnnnnnnnnnnnnnnnnnnnnnnnnnnnnnnnnnnnnnnnnnnnnnnnnnnnnnnnnnnnnnnnnnnnnnnnnnnnnnnnnnnnnnnnnnnnnnnnnnnnnnnnnnnnnnnnnnnnnnnnnnnnnnnnnnnnnnnnnnnnnnnnnnnnnnnnnnnnnnnnnnnnnnnnnnnnnnnnnnnnnnnnnnnnnnnnnnnnnnnnnnnnnnnnnnnnnnnnnnnnnnnnnnnnnnnnnnnnnnnnnnnnnnnnnnnnnnnnnnnnnnnnnnnnnnnnnnnnnnnnnnnnnnnnnnnnnnnnnnnnnnnnnnnnnnnnnnnnnnnnnnnnnnnnnnnnnnnnnnnnnnnnnnnnnnnnnnnnnnnnnnnnnnnnnnnnnnnnnnnnnnnnnnnnnnnnnnnnnnnnnnnnnnnnnnnnnnnnnnnnnnnnnnnnnnnnnnnnnnnnnnnnnnnnnnnnnnnnnnnnnnnnnnnnnnnnnnnnnnnnnnnnnnnnnnnnnnnnnnnnnnnnnnnnnnnnnnnnnnnnnnnnnnnnnnnnnnnnnnnnnnnnnnnnnnnnnnnnnnnnnnnnnnnnnnnnnnnnnnnnnnnnnnnnnnnnnnnnnnnnnnnnnnnnnnnnnnnnnnnnnnnnnnnnnnnnnnnnnnnnnnnnnnnnnnnnnnnnnnnnnnnnnnnnnnnnnnnnnnnnnnnnnnnnnnnnnnnnnnnnnnnnnnnnnnnnnnnnnnnnnnnnnnnnnnnnnnnnnnnnnnnnnnnnnnnnnnnnnnnnnnnnnnnnnnnnnnnnnnnnnnnnnnnnnnnnnnnnnnnnnnnnnnnnnnnnnnnnnnnnnnnnnnnnnnnnnnnnnnnnnnnnnnnnnnnnnnnnnnnnnnnnnnnnnnnnnnnnnnnnnnnnnnnnnnnnnnnnnnnnnnnnnnnnnnnnnnnnnnnnnnnnnnnnnnnnnnnnnnnnnnnnnnnnnnnnnnnnnnnnnnnnnnnnnnnnnnnnnnnnnnnnnnnnnnnnnnnnnnnnnnnnnnnnnnnnnnnnnnnnnnnnnnnnnnnnnnnnnnnnnnnnnnnnnnnnnnnnnnnnnnnnnnnnnnnnnnnnnnnnnnnnnnnnnnnnnnnnnnnnnnnnnnnnnnnnnnnnnnnnnnnnnnnnnnnnnnnnnnnnnnnnnnnnnnnnnnnnnnnnnnnnnnnnnnnnnnnnnnnnnnnnnnnnnnnnnnnnnnnnnnnnnnnnnnnnnnnnnnnnnnnnnnnnnnnnnnnnnnnnnnnnnnnnnnnnnnnnnnnnnnnnnnnnnnnnnnnnnnnnnnnnnnnnnnnnnnnnnnnnnnnnnnnnnnnnnnnnnnnnnnnnnnnnnnnnnnnnnnnnnnnnnnnnnnnnnnnnnnnnnnnnnnnnnnnnnnnnnnnnnnnnnnnnnnnnnnnnnnnnnnnnnnnnnnnnnnnnnnnnnnnnnnnnnnnnnnnnnnnnnnnnnnnnnnnnnnnnnnnnnnnnnnnnnnnnnnnnnnnnnnnnnnnnnnnnnnnnnnnnnnnnnnnnnnnnnnnnnnnnnnnnnnnnnnnnnnnnnnnnnnnnnnnnnnnnnnnnnnnnnnnnnnnnnnnnnnnnnnnnnnnnnnnnnnnnnnnnnnnnnnnnnnnnnnnnnnnnnnnnnnnnnnnnnnnnnnnnnnnnnnnnnnnnnnnnnnnnnnnnnnnnnnnnnnnnnnnnnnnnnnnnnnnnnnnnnnnnnnnnnnnnnnnnnnnnnnnnnnnnnnnnnnnnnnnnnnnnnnnnnnnnnnnnnnnnnnnnnnnnnnnnnnnnnnnnnnnnnnnnnnnnnnnnnnnnnnnnnnnnnnnnnnnnnnnnnnnnnnnnnnnnnnnnnnnnnnnnnnnnnnnnnnnnnnnnnnnnnnnnnnnnnnnnnnnnnnnnnnnnnnnnnnnnnnnnnnnnnnnnnnnnnnnnnnnnnnnnnnnnnnnnnnnnnnnnnnnnnnnnnnnnnnnnnnnnnnnnnnnnnnnnnnnnnnnnnnnnnnnnnnnnnnnnnnnnnnnnnnnnnnnnnnnnnnnnnnnnnnnnnnnnnnnnnnnnnnnnnnnnnnnnnnnnnnnnnnnnnnnnnnnnnnnnnnnnnnnnnnnnnnnnnnnnnnnnnnnnnnnnnnnnnnnnnnnnnnnnnnnnnnnnnnnnnnnnnnnnnnnnnnnnnnnnnnnnnnnnnnnnnnnnnnnnnnnnnnnnnnnnnnnnnnnnnnnnnnnnnnnnnnnnnnnnnnnnnnnnnnnnnnnnnnnnnnnnnnnnnnnnnnnnnnnnnnnnnnnnnnnnnnnnnnnnnnnnnnnnnnnnnnnnnnnnnnnnnnnnnnnnnnnnnnnnnnnnnnnnnnnnnnnnnnnnnnnnnnnnnnnnnnnnnnnnnnnnnnnnnnnnnnnnnnnnnnnnnnnnnnnnnnnnnnnnnnnnnnnnnnnnnnnnnnnnnnnnnnnnnnnnnnnnnnnnnnnnnnnnnnnnnnnnnnnnnnnnnnnnnnnnnnnnnnnnnnnnnnnnnnnnnnnnnnnnnnnnnnnnnnnnnnnnnnnnnnnnnnnnnnnnnnnnnnnnnnnnnnnnnnnnnnnnnnnnnnnnnnnnnnnnnnnnnnnnnnnnnnnnnnnnnnnnnnnnnnnnnnnnnnnnnnnnnnnnnnnnnnnnnnnnnnnnnnnnnnnnnnnnnnnnnnnnnnnnnnnnnnnnnnnnnnnnnnnnnnnnnnnnnnnnnnnnnnnnnnnnnnnnnnnnnnnnnnnnnnnnnnnnnnnnnnnnnnnnnnnnnnnnnnnnnnnnnnnnnnnnnnnnnnnnnnnnnnnnnnnnnnnnnnnnnnnnnnnnnnnnnnnnnnnnnnnnnnnnnnnnnnnnnnnnnnnnnnnnnnnnnnnnnnnnnnnnnnnnnnnnnnnnnnnnnnnnnnnnnnnnnnnnnnnnnnnnnnnnnnnnnnnnnnnnnnnnnnnnnnnnnnnnnnnnnnnnnnnnnnnnnnnnnnnnnnnnnnnnnnnnnnnnnnnnnnnnnnnnnnnnnnnnnnnnnnnnnnnnnnnnnnnnnnnnnnnnnnnnnnnnnnnnnnnnnnnnnnnnnnnnnnnnnnnnnnnnnnnnnnnnnnnnnnnnnnnnnnnnnnnnnnnnnnnnnnnnnnnnnnnnnnnnnnnnnnnnnnnnnnnnnnnnnnnnnnnnnnnnnnnnnnnnnnnnnnnnnnnnnnnnnnnnnnnnnnnnnnnnnnnnnnnnnnnnnnnnnnnnnnnnnnnnnnnnnnnnnnnnnnnnnnnnnnnnnnnnnnnnnnnnnnnnnnnnnnnnnnnnnnnnnnnnnnnnnnnnnnnnnnnnnnnnnnnnnnnnnnnnnnnnnnnnnnnnnnnnnnnnnnnnnnnnnnnnnnnnnnnnnnnnnnnnnnnnnnnnnnnnnnnnnnnnnnnnnnnnnnnnnnnnnnnnnnnnnnnnnnnnnnnnnnnnnnnnnnnnnnnnnnnnnnnnnnnnnnnnnnnnnnnnnnnnnnnnnnnnnnnnnnnnnnnnnnnnnnnnnnnnnnnnnnnnnnnnnnnnnnnnnnnnnnnnnnnnnnnnnnnnnnnnnnnnnnnnnnnnnnnnnnnnnnnnnnnnnnnnnnnnnnnnnnnnnnnnnnnnnnnnnnnnnnnnnnnnnnnnnnnnnnnnnnnnnnnnnnnnnnnnnnnnnnnnnnnnnnnnnnnnnnnnnnnnnnnnnnnnnnnnnnnnnnnnnnnnnnnnnnnnnnnnnnnnnnnnnnnnnnnnnnnnnnnnnnnnnnnnnnnnnnnnnnnnnnnnnnnnnnnnnnnnnnnnnnnnnnnnnnnnnnnnnnnnnnnnnnnnnnnnnnnnnnnnnnnnnnnnnnnnnnnnnnnnnnnnnnnnnnnnnnnnnnnnnnnnnnnnnnnnnnnnnnnnnnnnnnnnnnnnnnnnnnnnnnnnnnnnnnnnnnnnnnnnnnnnnnnnnnnnnnnnnnnnnnnnnnnnnnnnnnnnnnnnnnnnnnnnnnnnnnnnnnnnnnnnnnnnnnnnnnnnnnnnnnnnnnnnnnnnnnnnnnnnnnnnnnnnnnnnnnnnnnnnnnnnnnnnnnnnnnnnnnnnnnnnnnnnnnnnnnnnnnnnnnnnnnnnnnnnnnnnnnnnnnnnnnnnnnnnnnnnnnnnnnnnnnnnnnnnnnnnnnnnnnnnnnnnnnnnnnnnnnnnnnnnnnnnnnnnnnnnnnnnnnnnnnnnnnnnnnnnnnnnnnnnnnnnnnnnnnnnnnnnnnnnnnnnnnnnnnnnnnnnnnnnnnnnnnnnnnnnnnnnnnnnnnnnnnnnnnnnnnnnnnnnnnnnnnnnnnnnnnnnnnnnnnnnnnnnnnnnnnnnnnnnnnnnnnnnnnnnnnnnnnnnnnnnnnnnnnnnnnnnnnnnnnnnnnnnnnnnnnnnnnnnnnnnnnnnnnnnnnnnnnnnnnnnnnnnnnnnnnnnnnnnnnnnnnnnnnnnnnnnnnnnnnnnnnnnnnnnnnnnnnnnnnnnnnnnnnnnnnnnnnnnnnnnnnnnnnnnnnnnnnnnnnnnnnnnnnnnnnnnnnnnnnnnnnnnnnnnnnnnnnnnnnnnnnnnnnnnnnnnnnnnnnnnnnnnnnnnnnnnnnnnnnnnnnnnnnnnnnnnnnnnnnnnnnnnnnnnnnnnnnnnnnnnnnnnnnnnnnnnnnnnnnnnnnnnnnnnnnnnnnnnnnnnnnnnnnnnnnnnnnnnnnnnnnnnnnnnnnnnnnnnnnnnnnnnnnnnnnnnnnnnnnnnnnnnnnnnnnnnnnnnnnnnnnnnnnnnnnnnnnnnnnnnnnnnnnnnnnnnnnnnnnnnnnnnnnnnnnnnnnnnnnnnnnnnnnnnnnnnnnnnnnnnnnnnnnnnnnnnnnnnnnnnnnnnnnnnnnnnnnnnnnnnnnnnnnnnnnnnnnnnnnnnnnnnnnnnnnnnnnnnnnnnnnnnnnnnnnnnnnnnnnnnnnnnnnnnnnnnnnnnnnnnnnnnnnnnnnnnnnnnnnnnnnnnnnnnnnnnnnnnnnnnnnnnnnnnnnnnnnnnnnnnnnnnnnnnnnnnnnnnnnnnnnnnnnnnnnnnnnnnnnnnnnnnnnnnnnnnnnnnnnnnnnnnnnnnnnnnnnnnnnnnnnnnnnnnnnnnnnnnnnnnnnnnnnnnnnnnnnnnnnnnnnnnnnnnnnnnnnnnnnnnnnnnnnnnnnnnnnnnnnnnnnnnnnnnnnnnnnnnnnnnnnnnnnnnnnnnnnnnnnnnnnnnnnnnnnnnnnnnnnnnnnnnnnnnnnnnnnnnnnnnnnnnnnnnnnnnnnnnnnnnnnnnnnnnnnnnnnnnnnnnnnnnnnnnnnnnnnnnnnnnnnnnnnnnnnnnnnnnnnnnnnnnnnnnnnnnnnnnnnnnnnnnnnnnnnnnnnnnnnnnnnnnnnnnnnnnnnnnnnnnnnnnnnnnnnnnnnnnnnnnnnnnnnnnnnnnnnnnnnnnnnnnnnnnnnnnnnnnnnnnnnnnnnnnnnnnnnnnnnnnnnnnnnnnnnnnnnnnnnnnnnnnnnnnnnnnnnnnnnnnnnnnnnnnnnnnnnnnnnnnnnnnnnnnnnnnnnnnnnnnnnnnnnnnnnnnnnnnnnnnnnnnnnnnnnnnnnnnnnnnnnnnnnnnnnnnnnnnnnnnnnnnnnnnnnnnnnnnnnnnnnnnnnnnnnnnnnnnnnnnnnnnnnnnnnnnnnnnnnnnnnnnnnnnnnnnnnnnnnnnnnnnnnnnnnnnnnnnnnnnnnnnnnnnnnnnnnnnnnnnnnnnnnnnnnnnnnnnnnnnnnnnnnnnnnnnnnnnnnnnnnnnnnnnnnnnnnnnnnnnnnnnnnnnnnnnnnnnnnnnnnnnnnnnnnnnnnnnnnnnnnnnnnnnnnnnnnnnnnnnnnnnnnnnnnnnnnnnnnnnnnnnnnnnnnnnnnnnnnnnnnnnnnnnnnnnnnnnnnnnnnnnnnnnnnnnnnnnnnnnnnnnnnnnnnnnnnnnnnnnnnnnnnnnnnnnnnnnnnnnnnnnnnnnnnnnnnnnnnnnnnnnnnnnnnnnnnnnnnnnnnnnnnnnnnnnnnnnnnnnnnnnnnnnnnnnnnnnnnnnnnnnnnnnnnnnnnnnnnnnnnnnnnnnnnnnnnnnnnnnnnnnnnnnnnnnnnnnnnnnnnnnnnnnnnnnnnnnnnnnnnnnnnnnnnnnnnnnnnnnnnnnnnnnnnnnnnnnnnnnnnnnnnnnnnnnnnnnnnnnnnnnnnnnnnnnnnnnnnnnnnnnnnnnnnnnnnnnnnnnnnnnnnnnnnnnnnnnnnnnnnnnnnnnnnnnnnnnnnnnnnnnnnnnnnnnnnnnnnnnnnnnnnnnnnnnnnnnnnnnnnnnnnnnnnnnnnnnnnnnnnnnnnnnnnnnnnnnnnnnnnnnnnnnnnnnnnnnnnnnnnnnnnnnnnnnnnnnnnnnnnnnnnnnnnnnnnnnnnnnnnnnnnnnnnnnnnnnnnnnnnnnnnnnnnnnnnnnnnnnnnnnnnnnnnnnnnnnnnnnnnnnnnnnnnnnnnnnnnnnnnnnnnnnnnnnnnnnnnnnnnnnnnnnnnnnnnnnnnnnnnnnnnnnnnnnnnnnnnnnnnnnnnnnnnnnnnnnnnnnnnnnnnnnnnnnnnnnnnnnnnnnnnnnnnnnnnnnnnnnnnnnnnnnnnnnnnnnnnnnnnnnnnnnnnnnnnnnnnnnnnnnnnnnnnnnnnnnnnnnnnnnnnnnnnnnnnnnnnnnnnnnnnnnnnnnnnnnnnnnnnnnnnnnnnnnnnnnnnnnnnnnnnnnnnnnnnnnnnnnnnnnnnnnnnnnnnnnnnnnnnnnnnnnnnnnnnnnnnnnnnnnnnnnnnnnnnnnnnnnnnnnnnnnnnnnnnnnnnnnnnnnnnnnnnnnnnnnnnnnnnnnnnnnnnnnnnnnnnnnnnnnnnnnnnnnnnnnnnnnnnnnnnnnnnnnnnnnnnnnnnnnnnnnnnnnnnnnnnnnnnnnnnnnnnnnnnnnnnnnnnnnnnnnnnnnnnnnnnnnnnnnnnnnnnnnnnnnnnnnnnnnnnnnnnnnnnnnnnnnnnnnnnnnnnnnnnnnnnnnnnnnnnnnnnnnnnnnnnnnnnnnnnnnnnnnnnnnnnnnnnnnnnnnnnnnnnnnnnnnnnnnnnnnnnnnnnnnnnnnnnnnnnnnnnnnnnnnnnnnnnnnnnnnnnnnnnnnnnnnnnnnnnnnnnnnnnnnnnnnnnnnnnnnnnnnnnnnnnnnnnnnnnnnnnnnnnnnnnnnnnnnnnnnnnnnnnnnnnnnnnnnnnnnnnnnnnnnnnnnnnnnnnnnnnnnnnnnnnnnnnnnnnnnnnnnnnnnnnnnnnnnnnnnnnnnnnnnnnnnnnnnnnnnnnnnnnnnnnnnnnnnnnnnnnnnnnnnnnnnnnnnnnnnnnnnnnnnnnnnnnnnnnnnnnnnnnnnnnnnnnnnnnnnnnnnnnnnnnnnnnnnnnnnnnnnnnnnnnnnnnnnnnnnnnnnnnnnnnnnnnnnnnnnnnnnnnnnnnnnnnnnnnnnnnnnnnnnnnnnnnnnnnnnnnnnnnnnnnnnnnnnnnnnnnnnnnnnnnnnnnnnnnnnnnnnnnnnnnnnnnnnnnnnnnnnnnnnnnnnnnnnnnnnnnnnnnnnnnnnnnnnnnnnnnnnnnnnnnnnnnnnnnnnnnnnnnnnnnnnnnnnnnnnnnnnnnnnnnnnnnnnnnnnnnnnnnnnnnnnnnnnnnnnnnnnnnnnnnnnnnnnnnnnnnnnnnnnnnnnnnnnnnnnnnnnnnnnnnnnnnnnnnnnnnnnnnnnnnnnnnnnnnnnnnnnnnnnnnnnnnnnnnnnnnnnnnnnnnnnnnnnnnnnnnnnnnnnnnnnnnnnnnnnnnnnnnnnnnnnnnnnnnnnnnnnnnnnnnnnnnnnnnnnnnnnnnnnnnnnnnnnnnnnnnnnnnnnnnnnnnnnnnnnnnnnnnnnnnnnnnnnnnnnnnnnnnnnnnnnnnnnnnnnnnnnnnnnnnnnnnnnnnnnnnnnnnnnnnnnnnnnnnnnnnnnnnnnnnnnnnnnnnnnnnnnnnnnnnnnnnnnnnnnnnnnnnnnnnnnnnnnnnnnnnnnnnnnnnnnnnnnnnnnnnnnnnnnnnnnnnnnnnnnnnnnnnnnnnnnnnnnnnnnnnnnnnnnnnnnnnnnnnnnnnnnnnnnnnnnnnnnnnnnnnnnnnnnnnnnnnnnnnnnnnnnnnnnnnnnnnnnnnnnnnnnnnnnnnnnnnnnnnnnnnnnnnnnnnnnnnnnnnnnnnnnnnnnnnnnnnnnnnnnnnnnnnnnnnnnnnnnnnnnnnnnnnnnnnnnnnnnnnnnnnnnnnnnnnnnnnnnnnnnnnnnnnnnnnnnnnnnnnnnnnnnnnnnnnnnnnnnnnnnnnnnnnnnnnnnnnnnnnnnnnnnnnnnnnnnnnnnnnnnnnnnnnnnnnnnnnnnnnnnnnnnnnnnnnnnnnnnnnnnnnnnnnnnnnnnnnnnnnnnnnnnnnnnnnnnnnnnnnnnnnnnnnnnnnnnnnnnnnnnnnnnnnnnnnnnnnnnnnnnnnnnnnnnnnnnnnnnnnnnnnnnnnnnnnnnnnnnnnnnnnnnnnnnnnnnnnnnnnnnnnnnnnnnnnnnnnnnnnnnnnnnnnnnnnnnnnnnnnnnnnnnnnnnnnnnnnnnnnnnnnnnnnnnnnnnnnnnnnnnnnnnnnnnnnnnnnnnnnnnnnnnnnnnnnnnnnnnnnnnnnnnnnnnnnnnnnnnnnnnnnnnnnnnnnnnnnnnnnnnnnnnnnnnnnnnnnnnnnnnnnnnnnnnnnnnnnnnnnnnnnnnnnnnnnnnnnnnnnnnnnnnnnnnnnnnnnnnnnnnnnnnnnnnnnnnnnnnnnnnnnnnnnnnnnnnnnnnnnnnnnnnnnnnnnnnnnnnnnnnnnnnnnnnnnnnnnnnnnnnnnnnnnnnnnnnnnnnnnnnnnnnnnnnnnnnnnnnnnnnnnnnnnnnnnnnnnnnnnnnnnnnnnnnnnnnnnnnnnnnnnnnnnnnnnnnnnnnnnnnnnnnnnnnnnnnnnnnnnnnnnnnnnnnnnnnnnnnnnnnnnnnnnnnnnnnnnnnnnnnnnnnnnnnnnnnnnnnnnnnnnnnnnnnnnnnnnnnnnnnnnnnnnnnnnnnnnnnnnnnnnnnnnnnnnnnnnnnnnnnnnnnnnnnnnnnnnnnnnnnnnnnnnnnnnnnnnnnnnnnnnnnnnnnnnnnnnnnnnnnnnnnnnnnnnnnnnnnnnnnnnnnnnnnnnnnnnnnnnnnnnnnnnnnnnnnnnnnnnnnnnnnnnnnnnnnnnnnnnnnnnnnnnnnnnnnnnnnnnnnnnnnnnnnnnnnnnnnnnnnnnnnnnnnnnnnnnnnnnnnnnnnnnnnnnnnnnnnnnnnnnnnnnnnnnnnnnnnnnnnnnnnnnnnnnnnnnnnnnnnnnnnnnnnnnnnnnnnnnnnnnnnnnnnnnnnnnnnnnnnnnnnnnnnnnnnnnnnnnnnnnnnnnnnnnnnnnnnnnnnnnnnnnnnnnnnnnnnnnnnnnnnnnnnnnnnnnnnnnnnnnnnnnnnnnnnnnnnnnnnnnnnnnnnnnnnnnnnnnnnnnnnnnnnnnnnnnnnnnnnnnnnnnnnnnnnnnnnnnnnnnnnnnnnnnnnnnnnnnnnnnnnnnnnnnnnnnnnnnnnnnnnnnnnnnnnnnnnnnnnnnnnnnnnnnnnnnnnnnnnnnnnnnnnnnnnnnnnnnnnnnnnnnnnnnnnnnnnnnnnnnnnnnnnnnnnnnnnnnnnnnnnnnnnnnnnnnnnnnnnnnnnnnnnnnnnnnnnnnnnnnnnnnnnnnnnnnnnnnnnnnnnnnnnnnnnnnnnnnnnnnnnnnnnnnnnnnnnnnnnnnnnnnnnnnnnnnnnnnnnnnnnnnnnnnnnnnnnnnnnnnnnnnnnnnnnnnnnnnnnnnnnnnnnnnnnnnnnnnnnnnnnnnnnnnnnnnnnnnnnnnnnnnnnnnnnnnnnnnnnnnnnnnnnnnnnnnnnnnnnnnnnnnnnnnnnnnnnnnnnnnnnnnnnnnnnnnnnnnnnnnnnnnnnnnnnnnnnnnnnnnnnnnnnnnnnnnnnnnnnnnnnnnnnnnnnnnnnnnnnnnnnnnnnnnnnnnnnnnnnnnnnnnnnnnnnnnnnnnnnnnnnnnnnnnnnnnnnnnnnnnnnnnnnnnnnnnnnnnnnnnnnnnnnnnnnnnnnnnnnnnnnnnnnnnnnnnnnnnnnnnnnnnnnnnnnnnnnnnnnnnnnnnnnnnnnnnnnnnnnnnnnnnnnnnnnnnnnnnnnnnnnnnnnnnnnnnnnnnnnnnnnnnnnnnnnnnnnnnnnnnnnnnnnnnnnnnnnnnnnnnnnnnnnnnnnnnnnnnnnnnnnnnnnnnnnnnnnnnnnnnnnnnnnnnnnnnnnnnnnnnnnnnnnnnnnnnnnnnnnnnnnnnnnnnnnnnnnnnnnnnnnnnnnnnnnnnnnnnnnnnnnnnnnnnnnnnnnnnnnnnnnnnnnnnnnnnnnnnnnnnnnnnnnnnnnnnnnnnnnnnnnnnnnnnnnnnnnnnnnnnnnnnnnnnnnnnnnnnnnnnnnnnnnnnnnnnnnnnnnnnnnnnnnnnnnnnnnnnnnnnnnnnnnnnnnnnnnnnnnnnnnnnnnnnnnnnnnnnnnnnnnnnnnnnnnnnnnnnnnnnnnnnnnnnnnnnnnnnnnnnnnnnnnnnnnnnnnnnnnnnnnnnnnnnnnnnnnnnnnnnnnnnnnnnnnnnnnnnnnnnnnnnnnnnnnnnnnnnnnnnnnnnnnnnnnnnnnnnnnnnnnnnnnnnnnnnnnnnnnnnnnnnnnnnnnnnnnnnnnnnnnnnnnnnnnnnnnnnnnnnnnnnnnnnnnnnnnnnnnnnnnnnnnnnnnnnnnnnnnnnnnnnnnnnnnnnnnnnnnnnnnnnnnnnnnnnnnnnnnnnnnnnnnnnnnnnnnnnnnnnnnnnnnnnnnnnnnnnnnnnnnnnnnnnnnnnnnnnnnnnnnnnnnnnnnnnnnnnnnnnnnnnnnnnnnnnnnnnnnnnnnnnnnnnnnnnnnnnnnnnnnnnnnnnnnnnnnnnnnnnnnnnnnnnnnnnnnnnnnnnnnnnnnnnnnnnnnnnnnnnnnnnnnnnnnnnnnnnnnnnnnnnnnnnnnnnnnnnnnnnnnnnnnnnnnnnnnnnnnnnnnnnnnnnnnnnnnnnnnnnnnnnnnnnnnnnnnnnnnnnnnnnnnnnnnnnnnnnnnnnnnnnnnnnnnnnnnnnnnnnnnnnnnnnnnnnnnnnnnnnnnnnnnnnnnnnnnnnnnnnnnnnnnnnnnnnnnnnnnnnnnnnnnnnnnnnnnnnnnnnnnnnnnnnnnnnnnnnnnnnnnnnnnnnnnnnnnnnnnnnnnnnnnnnnnnnnnnnnnnnnnnnnnnnnnnnnnnnnnnnnnnnnnnnnnnnnnnnnnnnnnnnnnnnnnnnnnnnnnnnnnnnnnnnnnnnnnnnnnnnnnnnnnnnnnnnnnnnnnnnnnnnnnnnnnnnnnnnnnnnnnnnnnnnnnnnnnnnnnnnnnnnnnnnnnnnnnnnnnnnnnnnnnnnnnnnnnnnnnnnnnnnnnnnnnnnnnnnnnnnnnnnnnnnnnnnnnnnnnnnnnnnnnnnnnnnnnnnnnnnnnnnnnnnnnnnnnnnnnnnnnnnnnnnnnnnnnnnnnnnnnnnnnnnnnnnnnnnnnnnnnnnnnnnnnnnnnnnnnnnnnnnnnnnnnnnnnnnnnnnnnnnnnnnnnnnnnnnnnnnnnnnnnnnnnnnnnnnnnnnnnnnnnnnnnnnnnnnnnnnnnnnnnnnnnnnnnnnnnnnnnnnnnnnnnnnnnnnnnnnnnnnnnnnnnnnnnnnnnnnnnnnnnnnnnnnnnnnnnnnnnnnnnnnnnnnnnnnnnnnnnnnnnnnnnnnnnnnnnnnnnnnnnnnnnnnnnnnnnnnnnnnnnnnnnnnnnnnnnnnnnnnnnnnnnnnnnnnnnnnnnnnnnnnnnnnnnnnnnnnnnnnnnnnnnnnnnnnnnnnnnnnnnnnnnnnnnnnnnnnnnnnnnnnnnnnnnnnnnnnnnnnnnnnnnnnnnnnnnnnnnnnnnnnnnnnnnnnnnnnnnnnnnnnnnnnnnnnnnnnnnnnnnnnnnnnnnnnnnnnnnnnnnnnnnnnnnnnnnnnnnnnnnnnnnnnnnnnnnnnnnnnnnnnnnnnnnnnnnnnnnnnnnnnnnnnnnnnnnnnnnnnnnnnnnnnnnnnnnnnnnnnnnnnnnnnnnnnnnnnnnnnnnnnnnnnnnnnnnnnnnnnnnnnnnnnnnnnnnnnnnnnnnnnnnnnnnnnnnnnnnnnnnnnnnnnnnnnnnnnnnnnnnnnnnnnnnnnnnnnnnnnnnnnnnnnnnnnnnnnnnnnnnnnnnnnnnnnnnnnnnnnnnnnnnnnnnnnnnnnnnnnnnnnnnnnnnnnnnnnnnnnnnnnnnnnnnnnnnnnnnnnnnnnnnnnnnnnnnnnnnnnnnnnnnnnnnnnnnnnnnnnnnnnnnnnnnnnnnnnnnnnnnnnnnnnnnnnnnnnnnnnnnnnnnnnnnnnnnnnnnnnnnnnnnnnnnnnnnnnnnnnnnnnnnnnnnnnnnnnnnnnnnnnnnnnnnnnnnnnnnnnnnnnnnnnnnnnnnnnnnnnnnnnnnnnnnnnnnnnnnnnnnnnnnnnnnnnnnnnnnnnnnnnnnnnnnnnnnnnnnnnnnnnnnnnnnnnnnnnnnnnnnnnnnnnnnnnnnnnnnnnnnnnnnnnnnnnnnnnnnnnnnnnnnnnnnnnnnnnnnnnnnnnnnnnnnnnnnnnnnnnnnnnnnnnnnnnnnnnnnnnnnnnnnnnnnnnnnnnnnnnnnnnnnnnnnnnnnnnnnnnnnnnnnnnnnnnnnnnnnnnnnnnnnnnnnnnnnnnnnnnnnnnnnnnnnnnnnnnnnnnnnnnnnnnnnnnnnnnnnnnnnnnnnnnnnnnnnnnnnnnnnnnnnnnnnnnnnnnnnnnnnnnnnnnnnnnnnnnnnnnnnnnnnnnnnnnnnnnnnnnnnnnnnnnnnnnnnnnnnnnnnnnnnnnnnnnnnnnnnnnnnnnnnnnnnnnnnnnnnnnnnnnnnnnnnnnnnnnnnnnnnnnnnnnnnnnnnnnnnnnnnnnnnnnnnnnnnnnnnnnnnnnnnnnnnnnnnnnnnnnnnnnnnnnnnnnnnnnnnnnnnnnnnnnnnnnnnnnnnnnnnnnnnnnnnnnnnnnnnnnnnnnnnnnnnnnnnnnnnnnnnnnnnnnnnnnnnnnnnnnnnnnnnnnnnnnnnnnnnnnnnnnnnnnnnnnnnnnnnnnnnnnnnnnnnnnnnnnnnnnnnnnnnnnnnnnnnnnnnnnnnnnnnnnnnnnnnnnnnnnnnnnnnnnnnnnnnnnnnnnnnnnnnnnnnnnnnnnnnnnnnnnnnnnnnnnnnnnnnnnnnnnnnnnnnnnnnnnnnnnnnnnnnnnnnnnnnnnnnnnnnnnnnnnnnnnnnnnnnnnnnnnnnnnnnnnnnnnnnnnnnnnnnnnnnnnnnnnnnnnnnnnnnnnnnnnnnnnnnnnnnnnnnnnnnnnnnnnnnnnnnnnnnnnnnnnnnnnnnnnnnnnnnnnnnnnnnnnnnnnnnnnnnnnnnnnnnnnnnnnnnnnnnnnnnnnnnnnnnnnnnnnnnnnnnnnnnnnnnnnnnnnnnnnnnnnnnnnnnnnnnnnnnnnnnnnnnnnnnnnnnnnnnnnnnnnnnnnnnnnnnnnnnnnnnnnnnnnnnnnnnnnnnnnnnnnnnnnnnnnnnnnnnnnnnnnnnnnnnnnnnnnnnnnnnnnnnnnnnnnnnnnnnnnnnnnnnnnnnnnnnnnnnnnnnnnnnnnnnnnnnnnnnnnnnnnnnnnnnnnnnnnnnnnnnnnnnnnnnnnnnnnnnnnnnnnnnnnnnnnnnnnnnnnnnnnnnnnnnnnnnnnnnnnnnnnnnnnnnnnnnnnnnnnnnnnnnnnnnnnnnnnnnnnnnnnnnnnnnnnnnnnnnnnnnnnnnnnnnnnnnnnnnnnnnnnnnnnnnnnnnnnnnnnnnnnnnnnnnnnnnnnnnnnnnnnnnnnnnnnnnnnnnnnnnnnnnnnnnnnnnnnnnnnnnnnnnnnnnnnnnnnnnnnnnnnnnnnnnnnnnnnnnnnnnnnnnnnnnnnnnnnnnnnnnnnnnnnnnnnnnnnnnnnnnnnnnnnnnnnnnnnnnnnnnnnnnnnnnnnnnnnnnnnnnnnnnnnnnnnnnnnnnnnnnnnnnnnnnnnnnnnnnnnnnnnnnnnnnnnnnnnnnnnnnnnnnnnnnnnnnnnnnnnnnnnnnnnnnnnnnnnnnnnnnnnnnnnnnnnnnnnnnnnnnnnnnnnnnnnnnnnnnnnnnnnnnnnnnnnnnnnnnnnnnnnnnnnnnnnnnnnnnnnnnnnnnnnnnnnnnnnnnnnnnnnnnnnnnnnnnnnnnnnnnnnnnnnnnnnnnnnnnnnnnnnnnnnnnnnnnnnnnnnnnnnnnnnnnnnnnnnnnnnnnnnnnnnnnnnnnnnnnnnnnnnnnnnnnnnnnnnnnnnnnnnnnnnnnnnnnnnnnnnnnnnnnnnnnnnnnnnnnnnnnnnnnnnnnnnnnnnnnnnnnnnnnnnnnnnnnnnnnnnnnnnnnnnnnnnnnnnnnnnnnnnnnnnnnnnnnnnnnnnnnnnnnnnnnnnnnnnnnnnnnnnnnnnnnnnnnnnnnnnnnnnnnnnnnnnnnnnnnnnnnnnnnnnnnnnnnnnnnnnnnnnnnnnnnnnnnnnnnnnnnnnnnnnnnnnnnnnnnnnnnnnnnnnnnnnnnnnnnnnnnnnnnnnnnnnnnnnnnnnnnnnnnnnnnnnnnnnnnnnnnnnnnnnnnnnnnnnnnnnnnnnnnnnnnnnnnnnnnnnnnnnnnnnnnnnnnnnnnnnnnnnnnnnnnnnnnnnnnnnnnnnnnnnnnnnnnnnnnnnnnnnnnnnnnnnnnnnnnnnnnnnnnnnnnnnnnnnnnnnnnnnnnnnnnnnnnnnnnnnnnnnnnnnnnnnnnnnnnnnnnnnnnnnnnnnnnnnnnnnnnnnnnnnnnnnnnnnnnnnnnnnnnnnnnnnnnnnnnnnnnnnnnnnnnnnnnnnnnnnnnnnnnnnnnnnnnnnnnnnnnnnnnnnnnnnnnnnnnnnnnnnnnnnnnnnnnnnnnnnnnnnnnnnnnnnnnnnnnnnnnnnnnnnnnnnnnnnnnnnnnnnnnnnnnnnnnnnnnnnnnnnnnnnnnnnnnnnnnnnnnnnnnnnnnnnnnnnnnnnnnnnnnnnnnnnnnnnnnnnnnnnnnnnnnnnnnnnnnnnnnnnnnnnnnnnnnnnnnnnnnnnnnnnnnnnnnnnnnnnnnnnnnnnnnnnnnnnnnnnnnnnnnnnnnnnnnnnnnnnnnnnnnnnnnnnnnnnnnnnnnnnnnnnnnnnnnnnnnnnnnnnnnnnnnnnnnnnnnnnnnnnnnnnnnnnnnnnnnnnnnnnnnnnnnnnnnnnnnnnnnnnnnnnnnnnnnnnnnnnnnnnnnnnnnnnnnnnnnnnnnnnnnnnnnnnnnnnnnnnnnnnnnnnnnnnnnnnnnnnnnnnnnnnnnnnnnnnnnnnnnnnnnnnnnnnnnnnnnnnnnnnnnnnnnnnnnnnnnnnnnnnnnnnnnnnnnnnnnnnnnnnnnnnnnnnnnnnnnnnnnnnnnnnnnnnnnnnnnnnnnnnnnnnnnnnnnnnnnnnnnnnnnnnnnnnnnnnnnnnnnnnnnnnnnnnnnnnnnnnnnnnnnnnnnnnnnnnnnnnnnnnnnnnnnnnnnnnnnnnnnnnnnnnnnnnnnnnnnnnnnnnnnnnnnnnnnnnnnnnnnnnnnnnnnnnnnnnnnnnnnnnnnnnnnnnnnnnnnnnnnnnnnnnnnnnnnnnnnnnnnnnnnnnnnnnnnnnnnnnnnnnnnnnnnnnnnnnnnnnnnnnnnnnnnnnnnnnnnnnnnnnnnnnnnnnnnnnnnnnnnnnnnnnnnnnnnnnnnnnnnnnnnnnnnnnnnnnnnnnnnnnnnnnnnnnnnnnnnnnnnnnnnnnnnnnnnnnnnnnnnnnnnnnnnnnnnnnnnnnnnnnnnnnnnnnnnnnnnnnnnnnnnnnnnnnnnnnnnnnnnnnnnnnnnnnnnnnnnnnnnnnnnnnnnnnnnnnnnnnnnnnnnnnnnnnnnnnnnnnnnnnnnnnnnnnnnnnnnnnnnnnnnnnnnnnnnnnnnnnnnnnnnnnnnnnnnnnnnnnnnnnnnnnnnnnnnnnnnnnnnnnnnnnnnnnnnnnnnnnnnnnnnnnnnnnnnnnnnnnnnnnnnnnnnnnnnnnnnnnnnnnnnnnnnnnnnnnnnnnnnnnnnnnnnnnnnnnnnnnnnnnnnnnnnnnnnnnnnnnnnnnnnnnnnnnnnnnnnnnnnnnnnnnnnnnnnnnnnnnnnnnnnnnnnnnnnnnnnnnnnnnnnnnnnnnnnnnnnnnnnnnnnnnnnnnnnnnnnnnnnnnnnnnnnnnnnnnnnnnnnnnnnnnnnnnnnnnnnnnnnnnnnnnnnnnnnnnnnnnnnnnnnnnnnnnnnnnnnnnnnnnnnnnnnnnnnnnnnnnnnnnnnnnnnnnnnnnnnnnnnnnnnnnnnnnnnnnnnnnnnnnnnnnnnnnnnnnnnnnnnnnnnnnnnnnnnnnnnnnnnnnnnnnnnnnnnnnnnnnnnnnnnnnnnnnnnnnnnnnnnnnnnnnnnnnnnnnnnnnnnnnnnnnnnnnnnnnnnnnnnnnnnnnnnnnnnnnnnnnnnnnnnnnnnnnnnnnnnnnnnnnnnnnnnnnnnnnnnnnnnnnnnnnnnnnnnnnnnnnnnnnnnnnnnnnnnnnnnnnnnnnnnnnnnnnnnnnnnnnnnnnnnnnnnnnnnnnnnnnnnnnnnnnnnnnnnnnnnnnnnnnnnnnnnnnnnnnnnnnnnnnnnnnnnnnnnnnnnnnnnnnnnnnnnnnnnnnnnnnnnnnnnnnnnnnnnnnnnnnnnnnnnnnnnnnnnnnnnnnnnnnnnnnnnnnnnnnnnnnnnnnnnnnnnnnnnnnnnnnnnnnnnnnnnnnnnnnnnnnnnnnnnnnnnnnnnnnnnnnnnnnnnnnnnnnnnnnnnnnnnnnnnnnnnnnnnnnnnnnnnnnnnnnnnnnnnnnnnnnnnnnnnnnnnnnnnnnnnnnnnnnnnnnnnnnnnnnnnnnnnnnnnnnnnnnnnnnnnnnnnnnnnnnnnnnnnnnnnnnnnnnnnnnnnnnnnnnnnnnnnnnnnnnnnnnnnnnnnnnnnnnnnnnnnnnnnnnnnnnnnnnnnnnnnnnnnnnnnnnnnnnnnnnnnnnnnnnnnnnnnnnnnnnnnnnnnnnnnnnnnnnnnnnnnnnnnnnnnnnnnnnnnnnnnnnnnnnnnnnnnnnnnnnnnnnnnnnnnnnnnnnnnnnnnnnnnnnnnnnnnnnnnnnnnnnnnnnnnnnnnnnnnnnnnnnnnnnnnnnnnnnnnnnnnnnnnnnnnnnnnnnnnnnnnnnnnnnnnnnnnnnnnnnnnnnnnnnnnnnnnnnnnnnnnnnnnnnnnnnnnnnnnnnnnnnnnnnnnnnnnnnnnnnnnnnnnnnnnnnnnnnnnnnnnnnnnnnnnnnnnnnnnnnnnnnnnnnnnnnnnnnnnnnnnnnnnnnnnnnnnnnnnnnnnnnnnnnnnnnnnnnnnnnnnnnnnnnnnnnnnnnnnnnnnnnnnnnnnnnnnnnnnnnnnnnnnnnnnnnnnnnnnnnnnnnnnnnnnnnnnnnnnnnnnnnnnnnnnnnnnnnnnnnnnnnnnnnnnnnnnnnnnnnnnnnnnnnnnnnnnnnnnnnnnnnnnnnnnnnnnnnnnnnnnnnnnnnnnnnnnnnnnnnnnnnnnnnnnnnnnnnnnnnnnnnnnnnnnnnnnnnnnnnnnnnnnnnnnnnnnnnnnnnnnnnnnnnnnnnnnnnnnnnnnnnnnnnnnnnnnnnnnnnnnnnnnnnnnnnnnnnnnnnnnnnnnnnnnnnnnnnnnnnnnnnnnnnnnnnnnnnnnnnnnnnnnnnnnnnnnnnnnnnnnnnnnnnnnnnnnnnnnnnnnnnnnnnnnnnnnnnnnnnnnnnnnnnnnnnnnnnnnnnnnnnnnnnnnnnnnnnnnnnnnnnnnnnnnnnnnnnnnnnnnnnnnnnnnnnnnnnnnnnnnnnnnnnnnnnnnnnnnnnnnnnnnnnnnnnnnnnnnnnnnnnnnnnnnnnnnnnnnnnnnnnnnnnnnnnnnnnnnnnnnnnnnnnnnnnnnnnnnnnnnnnnnnnnnnnnnnnnnnnnnnnnnnnnnnnnnnnnnnnnnnnnnnnnnnnnnnnnnnnnnnnnnnnnnnnnnnnnnnnnnnnnnnnnnnnnnnnnnnnnnnnnnnnnnnnnnnnnnnnnnnnnnnnnnnnnnnnnnnnnnnnnnnnnnnnnnnnnnnnnnnnnnnnnnnnnnnnnnnnnnnnnnnnnnnnnnnnnnnnnnnnnnnnnnnnnnnnnnnnnnnnnnnnnnnnnnnnnnnnnnnnnnnnnnnnnnnnnnnnnnnnnnnnnnnnnnnnnnnnnnnnnnnnnnnnnnnnnnnnnnnnnnnnnnnnnnnnnnnnnnnnnnnnnnnnnnnnnnnnnnnnnnnnnnnnnnnnnnnnnnnnnnnnnnnnnnnnnnnnnnnnnnnnnnnnnnnnnnnnnnnnnnnnnnnnnnnnnnnnnnnnnnnnnnnnnnnnnnnnnnnnnnnnnnnnnnnnnnnnnnnnnnnnnnnnnnnnnnnnnnnnnnnnnnnnnnnnnnnnnnnnnnnnnnnnnnnnnnnnnnnnnnnnnnnnnnnnnnnnnnnnnnnnnnnnnnnnnnnnnnnnnnnnnnnnnnnnnnnnnnnnnnnnnnnnnnnnnnnnnnnnnnnnnnnnnnnnnnnnnnnnnnnnnnnnnnnnnnnnnnnnnnnnnnnnnnnnnnnnnnnnnnnnnnnnnnnnnnnnnnnnnnnnnnnnnnnnnnnnnnnnnnnnnnnnnnnnnnnnnnnnnnnnnnnnnnnnnnnnnnnnnnnnnnnnnnnnnnnnnnnnnnnnnnnnnnnnnnnnnnnnnnnnnnnnnnnnnnnnnnnnnnnnnnnnnnnnnnnnnnnnnnnnnnnnnnnnnnnnnnnnnnnnnnnnnnnnnnnnnnnnnnnnnnnnnnnnnnnnnnnnnnnnnnnnnnnnnnnnnnnnnnnnnnnnnnnnnnnnnnnnnnnnnnnnnnnnnnnnnnnnnnnnnnnnnnnnnnnnnnnnnnnnnnnnnnnnnnnnnnnnnnnnnnnnnnnnnnnnnnnnnnnnnnnnnnnnnnnnnnnnnnnnnnnnnnnnnnnnnnnnnnnnnnnnnnnnnnnnnnnnnnnnnnnnnnnnnnnnnnnnnnnnnnnnnnnnnnnnnnnnnnnnnnnnnnnnnnnnnnnnnnnnnnnnnnnnnnnnnnnnnnnnnnnnnnnnnnnnnnnnnnnnnnnnnnnnnnnnnnnnnnnnnnnnnnnnnnnnnnnnnnnnnnnnnnnnnnnnnnnnnnnnnnnnnnnnnnnnnnnnnnnnnnnnnnnnnnnnnnnnnnnnnnnnnnnnnnnnnnnnnnnnnnnnnnnnnnnnnnnnnnnnnnnnnnnnnnnnnnnnnnnnnnnnnnnnnnnnnnnnnnnnnnnnnnnnnnnnnnnnnnnnnnnnnnnnnnnnnnnnnnnnnnnnnnnnnnnnnnnnnnnnnnnnnnnnnnnnnnnnnnnnnnnnnnnnnnnnnnnnnnnnnnnnnnnnnnnnnnnnnnnnnnnnnnnnnnnnnnnnnnnnnnnnnnnnnnnnnnnnnnnnnnnnnnnnnnnnnnnnnnnnnnnnnnnnnnnnnnnnnnnnnnnnnnnnnnnnnnnnnnnnnnnnnnnnnnnnnnnnnnnnnnnnnnnnnnnnnnnnnnnnnnnnnnnnnnnnnnnnnnnnnnnnnnnnnnnnnnnnnnnnnnnnnnnnnnnnnnnnnnnnnnnnnnnnnnnnnnnnnnnnnnnnnnnnnnnnnnnnnnnnnnnnnnnnnnnnnnnnnnnnnnnnnnnnnnnnnnnnnnnnnnnnnnnnnnnnnnnnnnnnnnnnnnnnnnnnnnnnnnnnnnnnnnnnnnnnnnnnnnnnnnnnnnnnnnnnnnnnnnnnnnnnnnnnnnnnnnnnnnnnnnnnnnnnnnnnnnnnnnnnnnnnnnnnnnnnnnnnnnnnnnnnnnnnnnnnnnnnnnnnnnnnnnnnnnnnnnnnnnnnnnnnnnnnnnnnnnnnnnnnnnnnnnnnnnnnnnnnnnnnnnnnnnnnnnnnnnnnnnnnnnnnnnnnnnnnnnnnnnnnnnnnnnnnnnnnnnnnnnnnnnnnnnnnnnnnnnnnnnnnnnnnnnnnnnnnnnnnnnnnnnnnnnnnnnnnnnnnnnnnnnnnnnnnnnnnnnnnnnnnnnnnnnnnnnnnnnnnnnnnnnnnnnnnnnnnnnnnnnnnnnnnnnnnnnnnnnnnnnnnnnnnnnnnnnnnnnnnnnnnnnnnnnnnnnnnnnnnnnnnnnnnnnnnnnnnnnnnnnnnnnnnnnnnnnnnnnnnnnnnnnnnnnnnnnnnnnnnnnnnnnnnnnnnnnnnnnnnnnnnnnnnnnnnnnnnnnnnnnnnnnnnnnnnnnnnnnnnnnnnnnnnnnnnnnnnnnnnnnnnnnnnnnnnnnnnnnnnnnnnnnnnnnnnnnnnnnnnnnnnnnnnnnnnnnnnnnnnnnnnnnnnnnnnnnnnnnnnnnnnnnnnnnnnnnnnnnnnnnnnnnnnnnnnnnnnnnnnnnnnnnnnnnnnnnnnnnnnnnnnnnnnnnnnnnnnnnnnnnnnnnnnnnnnnnnnnnnnnnnnnnnnnnnnnnnnnnnnnnnnnnnnnnnnnnnnnnnnnnnnnnnnnnnnnnnnnnnnnnnnnnnnnnnnnnnnnnnnnnnnnnnnnnnnnnnnnnnnnnnnnnnnnnnnnnnnnnnnnnnnnnnnnnnnnnnnnnnnnnnnnnnnnnnnnnnnnnnnnnnnnnnnnnnnnnnnnnnnnnnnnnnnnnnnnnnnnnnnnnnnnnnnnnnnnnnnnnnnnnnnnnnnnnnnnnnnnnnnnnnnnnnnnnnnnnnnnnnnnnnnnnnnnnnnnnnnnnnnnnnnnnnnnnnnnnnnnnnnnnnnnnnnnnnnnnnnnnnnnnnnnnnnnnnnnnnnnnnnnnnnnnnnnnnnnnnnnnnnnnnnnnnnnnnnnnnnnnnnnnnnnnnnnnnnnnnnnnnnnnnnnnnnnnnnnnnnnnnnnnnnnnnnnnnnnnnnnnnnnnnnnnnnnnnnnnnnnnnnnnnnnnnnnnnnnnnnnnnnnnnnnnnnnnnnnnnnnnnnnnnnnnnnnnnnnnnnnnnnnnnnnnnnnnnnnnnnnnnnnnnnnnnnnnnnnnnnnnnnnnnnnnnnnnnnnnnnnnnnnnnnnnnnnnnnnnnnnnnnnnnnnnnnnnnnnnnnnnnnnnnnnnnnnnnnnnnnnnnnnnnnnnnnnnnnnnnnnnnnnnnnnnnnnnnnnnnnnnnnnnnnnnnnnnnnnnnnnnnnnnnnnnnnnnnnnnnnnnnnnnnnnnnnnnnnnnnnnnnnnnnnnnnnnnnnnnnnnnnnnnnnnnnnnnnnnnnnnnnnnnnnnnnnnnnnnnnnnnnnnnnnnnnnnnnnnnnnnnnnnnnnnnnnnnnnnnnnnnnnnnnnnnnnnnnnnnnnnnnnnnnnnnnnnnnnnnnnnnnnnnnnnnnnnnnnnnnnnnnnnnnnnnnnnnnnnnnnnnnnnnnnnnnnnnnnnnnnnnnnnnnnnnnnnnnnnnnnnnnnnnnnnnnnnnnnnnnnnnnnnnnnnnnnnnnnnnnnnnnnnnnnnnnnnnnnnnnnnnnnnnnnnnnnnnnnnnnnnnnnnnnnnnnnnnnnnnnnnnnnnnnnnnnnnnnnnnnnnnnnnnnnnnnnnnnnnnnnnnnnnnnnnnnnnnnnnnnnnnnnnnnnnnnnnnnnnnnnnnnnnnnnnnnnnnnnnnnnnnnnnnnnnnnnnnnnnnnnnnnnnnnnnnnnnnnnnnnnnnnnnnnnnnnnnnnnnnnnnnnnnnnnnnnnnnnnnnnnnnnnnnnnnnnnnnnnnnnnnnnnnnnnnnnnnnnnnnnnnnnnnnnnnnnnnnnnnnnnnnnnnnnnnnnnnnnnnnnnnnnnnnnnnnnnnnnnnnnnnnnnnnnnnnnnnnnnnnnnnnnnnnnnnnnnnnnnnnnnnnnnnnnnnnnnnnnnnnnnnnnnnnnnnnnnnnnnnnnnnnnnnnnnnnnnnnnnnnnnnnnnnnnnnnnnnnnnnnnnnnnnnnnnnnnnnnnnnnnnnnnnnnnnnnnnnnnnnnnnnnnnnnnnnnnnnnnnnnnnnnnnnnnnnnnnnnnnnnnnnnnnnnnnnnnnnnnnnnnnnnnnnnnnnnnnnnnnnnnnnnnnnnnnnnnnnnnnnnnnnnnnnnnnnnnnnnnnnnnnnnnnnnnnnnnnnnnnnnnnnnnnnnnnnnnnnnnnnnnnnnnnnnnnnnnnnnnnnnnnnnnnnnnnnnnnnnnnnnnnnnnnnnnnnnnnnnnnnnnnnnnnnnnnnnnnnnnnnnnnnnnnnnnnnnnnnnnnnnnnnnnnnnnnnnnnnnnnnnnnnnnnnnnnnnnnnnnnnnnnnnnnnnnnnnnnnnnnnnnnnnnnnnnnnnnnnnnnnnnnnnnnnnnnnnnnnnnnnnnnnnnnnnnnnnnnnnnnnnnnnnnnnnnnnnnnnnnnnnnnnnnnnnnnnnnnnnnnnnnnnnnnnnnnnnnnnnnnnnnnnnnnnnnnnnnnnnnnnnnnnnnnnnnnnnnnnnnnnnnnnnnnnnnnnnnnnnnnnnnnnnnnnnnnnnnnnnnnnnnnnnnnnnnnnnnnnnnnnnnnnnnnnnnnnnnnnnnnnnnnnnnnnnnnnnnnnnnnnnnnnnnnnnnnnnnnnnnnnnnnnnnnnnnnnnnnnnnnnnnnnnnnnnnnnnnnnnnnnnnnnnnnnnnnnnnnnnnnnnnnnnnnnnnnnnnnnnnnnnnnnnnnnnnnnnnnnnnnnnnnnnnnnnnnnnnnnnnnnnnnnnnnnnnnnnnnnnnnnnnnnnnnnnnnnnnnnnnnnnnnnnnnnnnnnnnnnnnnnnnnnnnnnnnnnnnnnnnnnnnnnnnnnnnnnnnnnnnnnnnnnnnnnnnnnnnnnnnnnnnnnnnnnnnnnnnnnnnnnnnnnnnnnnnnnnnnnnnnnnnnnnnnnnnnnnnnnnnnnnnnnnnnnnnnnnnnnnnnnnnnnnnnnnnnnnnnnnnnnnnnnnnnnnnnnnnnnnnnnnnnnnnnnnnnnnnnnnnnnnnnnnnnnnnnnnnnnnnnnnnnnnnnnnnnnnnnnnnnnnnnnnnnnnnnnnnnnnnnnnnnnnnnnnnnnnnnnnnnnnnnnnnnnnnnnnnnnnnnnnnnnnnnnnnnnnnnnnnnnnnnnnnnnnnnnnnnnnnnnnnnnnnnnnnnnnnnnnnnnnnnnnnnnnnnnnnnnnnnnnnnnnnnnnnnnnnnnnnnnnnnnnnnnnnnnnnnnnnnnnnnnnnnnnnnnnnnnnnnnnnnnnnnnnnnnnnnnnnnnnnnnnnnnnnnnnnnnnnnnnnnnnnnnnnnnnnnnnnnnnnnnnnnnnnnnnnnnnnnnnnnnnnnnnnnnnnnnnnnnnnnnnnnnnnnnnnnnnnnnnnnnnnnnnnnnnnnnnnnnnnnnnnnnnnnnnnnnnnnnnnnnnnnnnnnnnnnnnnnnnnnnnnnnnnnnnnnnnnnnnnnnnnnnnnnnnnnnnnnnnnnnnnnnnnnnnnnnnnnnnnnnnnnnnnnnnnnnnnnnnnnnnnnnnnnnnnnnnnnnnnnnnnnnnnnnnnnnnnnnnnnnnnnnnnnnnnnnnnnnnnnnnnnnnnnnnnnnnnnnnnnnnnnnnnnnnnnnnnnnnnnnnnnnnnnnnnnnnnnnnnnnnnnnnnnnnnnnnnnnnnnnnnnnnnnnnnnnnnnnnnnnnnnnnnnnnnnnnnnnnnnnnnnnnnnnnnnnnnnnnnnnnnnnnnnnnnnnnnnnnnnnnnnnnnnnnnnnnnnnnnnnnnnnnnnnnnnnnnnnnnnnnnnnnnnnnnnnnnnnnnnnnnnnnnnnnnnnnnnnnnnnnnnnnnnnnnnnnnnnnnnnnnnnnnnnnnnnnnnnnnnnnnnnnnnnnnnnnnnnnnnnnnnnnnnnnnnnnnnnnnnnnnnnnnnnnnnnnnnnnnnnnnnnnnnnnnnnnnnnnnnnnnnnnnnnnnnnnnnnnnnnnnnnnnnnnnnnnnnnnnnnnnnnnnnnnnnnnnnnnnnnnnnnnnnnnnnnnnnnnnnnnnnnnnnnnnnnnnnnnnnnnnnnnnnnnnnnnnnnnnnnnnnnnnnnnnnnnnnnnnnnnnnnnnnnnnnnnnnnnnnnnnnnnnnnnnnnnnnnnnnnnnnnnnnnnnnnnnnnnnnnnnnnnnnnnnnnnnnnnnnnnnnnnnnnnnnnnnnnnnnnnnnnnnnnnnnnnnnnnnnnnnnnnnnnnnnnnnnnnnnnnnnnnnnnnnnnnnnnnnnnnnnnnnnnnnnnnnnnnnnnnnnnnnnnnnnnnnnnnnnnnnnnnnnnnnnnnnnnnnnnnnnnnnnnnnnnnnnnnnnnnnnnnnnnnnnnnnnnnnnnnnnnnnnnnnnnnnnnnnnnnnnnnnnnnnnnnnnnnnnnnnnnnnnnnnnnnnnnnnnnnnnnnnnnnnnnnnnnnnnnnnnnnnnnnnnnnnnnnnnnnnnnnnnnnnnnnnnnnnnnnnnnnnnnnnnnnnnnnnnnnnnnnnnnnnnnnnnnnnnnnnnnnnnnnnnnnnnnnnnnnnnnnnnnnnnnnnnnnnnnnnnnnnnnnnnnnnnnnnnnnnnnnnnnnnnnnnnnnnnnnnnnnnnnnnnnnnnnnnnnnnnnnnnnnnnnnnnnnnnnnnnnnnnnnnnnnnnnnnnnnnnnnnnnnnnnnnnnnnnnnnnnnnnnnnnnnnnnnnnnnnnnnnnnnnnnnnnnnnnnnnnnnnnnnnnnnnnnnnnnnnnnnnnnnnnnnnnnnnnnnnnnnnnnnnnnnnnnnnnnnnnnnnnnnnnnnnnnnnnnnnnnnnnnnnnnnnnnnnnnnnnnnnnnnnnnnnnnnnnnnnnnnnnnnnnnnnnnnnnnnnnnnnnnnnnnnnnnnnnnnnnnnnnnnnnnnnnnnnnnnnnnnnnnnnnnnnnnnnnnnnnnnnnnnnnnnnnnnnnnnnnnnnnnnnnnnnnnnnnnnnnnnnnnnnnnnnnnnnnnnnnnnnnnnnnnnnnnnnnnnnnnnnnnnnnnnnnnnnnnnnnnnnnnnnnnnnnnnnnnnnnnnnnnnnnnnnnnnnnnnnnnnnnnnnnnnnnnnnnnnnnnnnnnnnnnnnnnnnnnnnnnnnnnnnnnnnnnnnnnnnnnnnnnnnnnnnnnnnnnnnnnnnnnnnnnnnnnnnnnnnnnnnnnnnnnnnnnnnnnnnnnnnnnnnnnnnnnnnnnnnnnnnnnnnnnnnnnnnnnnnnnnnnnnnnnnnnnnnnnnnnnnnnnnnnnnnnnnnnnnnnnnnnnnnnnnnnnnnnnnnnnnnnnnnnnnnnnnnnnnnnnnnnnnnnnnnnnnnnnnnnnnnnnnnnnnnnnnnnnnnnnnnnnnnnnnnnnnnnnnnnnnnnnnnnnnnnnnnnnnnnnnnnnnnnnnnnnnnnnnnnnnnnnnnnnnnnnnnnnnnnnnnnnnnnnnnnnnnnnnnnnnnnnnnnnnnnnnnnnnnnnnnnnnnnnnnnnnnnnnnnnnnnnnnnnnnnnnnnnnnnnnnnnnnnnnnnnnnnnnnnnnnnnnnnnnnnnnnnnnnnnnnnnnnnnnnnnnnnnnnnnnnnnnnnnnnnnnnnnnnnnnnnnnnnnnnnnnnnnnnnnnnnnnnnnnnnnnnnnnnnnnnnnnnnnnnnnnnnnnnnnnnnnnnnnnnnnnnnnnnnnnnnnnnnnnnnnnnnnnnnnnnnnnnnnnnnnnnnnnnnnnnnnnnnnnnnnnnnnnnnnnnnnnnnnnnnnnnnnnnnnnnnnnnnnnnnnnnnnnnnnnnnnnnnnnnnnnnnnnnnnnnnnnnnnnnnnnnnnnnnnnnnnnnnnnnnnnnnnnnnnnnnnnnnnnnnnnnnnnnnnnnnnnnnnnnnnnnnnnnnnnnnnnnnnnnnnnnnnnnnnnnnnnnnnnnnnnnnnnnnnnnnnnnnnnnnnnnnnnnnnnnnnnnnnnnnnnnnnnnnnnnnnnnnnnnnnnnnnnnnnnnnnnnnnnnnnnnnnnnnnnnnnnnnnnnnnnnnnnnnnnnnnnnnnnnnnnnnnnnnnnnnnnnnnnnnnnnnnnnnnnnnnnnnnnnnnnnnnnnnnnnnnnnnnnnnnnnnnnnnnnnnnnnnnnnnnnnnnnnnnnnnnnnnnnnnnnnnnnnnnnnnnnnnnnnnnnnnnnnnnnnnnnnnnnnnnnnnnnnnnnnnnnnnnnnnnnnnnnnnnnnnnnnnnnnnnnnnnnnnnnnnnnnnnnnnnnnnnnnnnnnnnnnnnnnnnnnnnnnnnnnnnnnnnnnnnnnnnnnnnnnnnnnnnnnnnnnnnnnnnnnnnnnnnnnnnnnnnnnnnnnnnnnnnnnnnnnnnnnnnnnnnnnnnnnnnnnnnnnnnnnnnnnnnnnnnnnnnnnnnnnnnnnnnnnnnnnnnnnnnnnnnnnnnnnnnnnnnnnnnnnnnnnnnnnnnnnnnnnnnnnnnnnnnnnnnnnnnnnnnnnnnnnnnnnnnnnnnnnnnnnnnnnnnnnnnnnnnnnnnnnnnnnnnnnnnnnnnnnnnnnnnnnnnnnnnnnnnnnnnnnnnnnnnnnnnnnnnnnnnnnnnnnnnnnnnnnnnnnnnnnnnnnnnnnnnnnnnnnnnnnnnnnnnnnnnnnnnnnnnnnnnnnnnnnnnnnnnnnnnnnnnnnnnnnnnnnnnnnnnnnnnnnnnnnnnnnnnnnnnnnnnnnnnnnnnnnnnnnnnnnnnnnnnnnnnnnnnnnnnnnnnnnnnnnnnnnnnnnnnnnnnnnnnnnnnnnnnnnnnnnnnnnnnnnnnnnnnnnnnnnnnnnnnnnnnnnnnnnnnnnnnnnnnnnnnnnnnnnnnnnnnnnnnnnnnnnnnnnnnnnnnnnnnnnnnnnnnnnnnnnnnnnnnnnnnnnnnnnnnnnnnnnnnnnnnnnnnnnnnnnnnnnnnnnnnnnnnnnnnnnnnnnnnnnnnnnnnnnnnnnnnnnnnnnnnnnnnnnnnnnnnnnnnnnnnnnnnnnnnnnnnnnnnnnnnnnnnnnnnnnnnnnnnnnnnnnnnnnnnnnnnnnnnnnnnnnnnnnnnnnnnnnnnnnnnnnnnnnnnnnnnnnnnnnnnnnnnnnnnnnnnnnnnnnnnnnnnnnnnnnnnnnnnnnnnnnnnnnnnnnnnnnnnnnnnnnnnnnnnnnnnnnnnnnnnnnnnnnnnnnnnnnnnnnnnnnnnnnnnnnnnnnnnnnnnnnnnnnnnnnnnnnnnnnnnnnnnnnnnnnnnnnnnnnnnnnnnnnnnnnnnnnnnnnnnnnnnnnnnnnnnnnnnnnnnnnnnnnnnnnnnnnnnnnnnnnnnnnnnnnnnnnnnnnnnnnnnnnnnnnnnnnnnnnnnnnnnnnnnnnnnnnnnnnnnnnnnnnnnnnnnnnnnnnnnnnnnnnnnnnnnnnnnnnnnnnnnnnnnnnnnnnnnnnnnnnnnnnnnnnnnnnnnnnnnnnnnnnnnnnnnnnnnnnnnnnnnnnnnnnnnnnnnnnnnnnnnnnnnnnnnnnnnnnnnnnnnnnnnnnnnnnnnnnnnnnnnnnnnnnnnnnnnnnnnnnnnnnnnnnnnnnnnnnnnnnnnnnnnnnnnnnnnnnnnnnnnnnnnnnnnnnnnnnnnnnnnnnnnnnnnnnnnnnnnnnnnnnnnnnnnnnnnnnnnnnnnnnnnnnnnnnnnnnnnnnnnnnnnnnnnnnnnnnnnnnnnnnnnnnnnnnnnnnnnnnnnnnnnnnnnnnnnnnnnnnnnnnnnnnnnnnnnnnnnnnnnnnnnnnnnnnnnnnnnnnnnnnnnnnnnnnnnnnnnnnnnnnnnnnnnnnnnnnnnnnnnnnnnnnnnnnnnnnnnnnnnnnnnnnnnnnnnnnnnnnnnnnnnnnnnnnnnnnnnnnnnnnnnnnnnnnnnnnnnnnnnnnnnnnnnnnnnnnnnnnnnnnnnnnnnnnnnnnnnnnnnnnnnnnnnnnnnnnnnnnnnnnnnnnnnnnnnnnnnnnnnnnnnnnnnnnnnnnnnnnnnnnnnnnnnnnnnnnnnnnnnnnnnnnnnnnnnnnnnnnnnnnnnnnnnnnnnnnnnnnnnnnnnnnnnnnnnnnnnnnnnnnnnnnnnnnnnnnnnnnnnnnnnnnnnnnnnnnnnnnnnnnnnnnnnnnnnnnnnnnnnnnnnnnnnnnnnnnnnnnnnnnnnnnnnnnnnnnnnnnnnnnnnnnnnnnnnnnnnnnnnnnnnnnnnnnnnnnnnnnnnnnnnnnnnnnnnnnnnnnnnnnnnnnnnnnnnnnnnnnnnnnnnnnnnnnnnnnnnnnnnnnnnnnnnnnnnnnnnnnnnnnnnnnnnnnnnnnnnnnnnnnnnnnnnnnnnnnnnnnnnnnnnnnnnnnnnnnnnnnnnnnnnnnnnnnnnnnnnnnnnnnnnnnnnnnnnnnnnnnnnnnnnnnnnnnnnnnnnnnnnnnnnnnnnnnnnnnnnnnnnnnnnnnnnnnnnnnnnnnnnnnnnnnnnnnnnnnnnnnnnnnnnnnnnnnnnnnnnnnnnnnnnnnnnnnnnnnnnnnnnnnnnnnnnnnnnnnnnnnnnnnnnnnnnnnnnnnnnnnnnnnnnnnnnnnnnnnnnnnnnnnnnnnnnnnnnnnnnnnnnnnnnnnnnnnnnnnnnnnnnnnnnnnnnnnnnnnnnnnnnnnnnnnnnnnnnnnnnnnnnnnnnnnnnnnnnnnnnnnnnnnnnnnnnnnnnnnnnnnnnnnnnnnnnnnnnnnnnnnnnnnnnnnnnnnnnnnnnnnnnnnnnnnnnnnnnnnnnnnnnnnnnnnnnnnnnnnnnnnnnnnnnnnnnnnnnnnnnnnnnnnnnnnnnnnnnnnnnnnnnnnnnnnnnnnnnnnnnnnnnnnnnnnnnnnnnnnnnnnnnnnnnnnnnnnnnnnnnnnnnnnnnnnnnnnnnnnnnnnnnnnnnnnnnnnnnnnnnnnnnnnnnnnnnnnnnnnnnnnnnnnnnnnnnnnnnnnnnnnnnnnnnnnnnnnnnnnnnnnnnnnnnnnnnnnnnnnnnnnnnnnnnnnnnnnnnnnnnnnnnnnnnnnnnnnnnnnnnnnnnnnnnnnnnnnnnnnnnnnnnnnnnnnnnnnnnnnnnnnnnnnnnnnnnnnnnnnnnnnnnnnnnnnnnnnnnnnnnnnnnnnnnnnnnnnnnnnnnnnnnnnnnnnnnnnnnnnnnnnnnnnnnnnnnnnnnnnnnnnnnnnnnnnnnnnnnnnnnnnnnnnnnnnnnnnnnnnnnnnnnnnnnnnnnnnnnnnnnnnnnnnnnnnnnnnnnnnnnnnnnnnnnnnnnnnnnnnnnnnnnnnnnnnnnnnnnnnnnnnnnnnnnnnnnnnnnnnnnnnnnnnnnnnnnnnnnnnnnnnnnnnnnnnnnnnnnnnnnnnnnnnnnnnnnnnnnnnnnnnnnnnnnnnnnnnnnnnnnnnnnnnnnnnnnnnnnnnnnnnnnnnnnnnnnnnnnnnnnnnnnnnnnnnnnnnnnnnnnnnnnnnnnnnnnnnnnnnnnnnnnnnnnnnnnnnnnnnnnnnnnnnnnnnnnnnnnnnnnnnnnnnnnnnnnnnnnnnnnnnnnnnnnnnnnnnnnnnnnnnnnnnnnnnnnnnnnnnnnnnnnnnnnnnnnnnnnnnnnnnnnnnnnnnnnnnnnnnnnnnnnnnnnnnnnnnnnnnnnnnnnnnnnnnnnnnnnnnnnnnnnnnnnnnnnnnnnnnnnnnnnnnnnnnnnnnnnnnnnnnnnnnnnnnnnnnnnnnnnnnnnnnnnnnnnnnnnnnnnnnnnnnnnnnnnnnnnnnnnnnnnnnnnnnnnnnnnnnnnnnnnnnnnnnnnnnnnnnnnnnnnnnnnnnnnnnnnnnnnnnnnnnnnnnnnnnnnnnnnnnnnnnnnnnnnnnnnnnnnnnnnnnnnnnnnnnnnnnnnnnnnnnnnnnnnnnnnnnnnnnnnnnnnnnnnnnnnnnnnnnnnnnnnnnnnnnnnnnnnnnnnnnnnnnnnnnnnnnnnnnnnnnnnnnnnnnnnnnnnnnnnnnnnnnnnnnnnnnnnnnnnnnnnnnnnnnnnnnnnnnnnnnnnnnnnnnnnnnnnnnnnnnnnnnnnnnnnnnnnnnnnnnnnnnnnnnnnnnnnnnnnnnnnnnnnnnnnnnnnnnnnnnnnnnnnnnnnnnnnnnnnnnnnnnnnnnnnnnnnnnnnnnnnnnnnnnnnnnnnnnnnnnnnnnnnnnnnnnnnnnnnnnnnnnnnnnnnnnnnnnnnnnnnnnnnnnnnnnnnnnnnnnnnnnnnnnnnnnnnnnnnnnnnnnnnnnnnnnnnnnnnnnnnnnnnnnnnnnnnnnnnnnnnnnnnnnnnnnnnnnnnnnnnnnnnnnnnnnnnnnnnnnnnnnnnnnnnnnnnnnnnnnnnnnnnnnnnnnnnnnnnnnnnnnnnnnnnnnnnnnnnnnnnnnnnnnnnnnnnnnnnnnnnnnnnnnnnnnnnnnnnnnnnnnnnnnnnnnnnnnnnnnnnnnnnnnnnnnnnnnnnnnnnnnnnnnnnnnnnnnnnnnnnnnnnnnnnnnnnnnnnnnnnnnnnnnnnnnnnnnnnnnnnnnnnnnnnnnnnnnnnnnnnnnnnnnnnnnnnnnnnnnnnnnnnnnnnnnnnnnnnnnnnnnnnnnnnnnnnnnnnnnnnnnnnnnnnnnnnnnnnnnnnnnnnnnnnnnnnnnnnnnnnnnnnnnnnnnnnnnnnnnnnnnnnnnnnnnnnnnnnnnnnnnnnnnnnnnnnnnnnnnnnnnnnnnnnnnnnnnnnnnnnnnnnnnnnnnnnnnnnnnnnnnnnnnnnnnnnnnnnnnnnnnnnnnnnnnnnnnnnnnnnnnnnnnnnnnnnnnnnnnnnnnnnnnnnnnnnnnnnnnnnnnnnnnnnnnnnnnnnnnnnnnnnnnnnnnnnnnnnnnnnnnnnnnnnnnnnnnnnnnnnnnnnnnnnnnnnnnnnnnnnnnnnnnnnnnnnnnnnnnnnnnnnnnnnnnnnnnnnnnnnnnnnnnnnnnnnnnnnnnnnnnnnnnnnnnnnnnnnnnnnnnnnnnnnnnnnnnnnnnnnnnnnnnnnnnnnnnnnnnnnnnnnnnnnnnnnnnnnnnnnnnnnnnnnnnnnnnnnnnnnnnnnnnnnnnnnnnnnnnnnnnnnnnnnnnnnnnnnnnnnnnnnnnnnnnnnnnnnnnnnnnnnnnnnnnnnnnnnnnnnnnnnnnnnnnnnnnnnnnnnnnnnnnnnnnnnnnnnnnnnnnnnnnnnnnnnnnnnnnnnnnnnnnnnnnnnnnnnnnnnnnnnnnnnnnnnnnnnnnnnnnnnnnnnnnnnnnnnnnnnnnnnnnnnnnnnnnnnnnnnnnnnnnnnnnnnnnnnnnnnnnnnnnnnnnnnnnnnnnnnnnnnnnnnnnnnnnnnnnnnnnnnnnnnnnnnnnnnnnnnnnnnnnnnnnnnnnnnnnnnnnnnnnnnnnnnnnnnnnnnnnnnnnnnnnnnnnnnnnnnnnnnnnnnnnnnnnnnnnnnnnnnnnnnnnnnnnnnnnnnnnnnnnnnnnnnnnnnnnnnnnnnnnnnnnnnnnnnnnnnnnnnnnnnnnnnnnnnnnnnnnnnnnnnnnnnnnnnnnnnnnnnnnnnnnnnnnnnnnnnnnnnnnnnnnnnnnnnnnnnnnnnnnnnnnnnnnnnnnnnnnnnnnnnnnnnnnnnnnnnnnnnnnnnnnnnnnnnnnnnnnnnnnnnnnnnnnnnnnnnnnnnnnnnnnnnnnnnnnnnnnnnnnnnnnnnnnnnnnnnnnnnnnnnnnnnnnnnnnnnnnnnnnnnnnnnnnnnnnnnnnnnnnnnnnnnnnnnnnnnnnnnnnnnnnnnnnnnnnnnnnnnnnnnnnnnnnnnnnnnnnnnnnnnnnnnnnnnnnnnnnnnnnnnnnnnnnnnnnnnnnnnnnnnnnnnnnnnnnnnnnnnnnnnnnnnnnnnnnnnnnnnnnnnnnnnnnnnnnnnnnnnnnnnnnnnnnnnnnnnnnnnnnnnnnnnnnnnnnnnnnnnnnnnnnnnnnnnnnnnnnnnnnnnnnnnnnnnnnnnnnnnnnnnnnnnnnnnnnnnnnnnnnnnnnnnnnnnnnnnnnnnnnnnnnnnnnnnnnnnnnnnnnnnnnnnnnnnnnnnnnnnnnnnnnnnnnnnnnnnnnnnnnnnnnnnnnnnnnnnnnnnnnnnnnnnnnnnnnnnnnnnnnnnnnnnnnnnnnnnnnnnnnnnnnnnnnnnnnnnnnnnnnnnnnnnnnnnnnnnnnnnnnnnnnnnnnnnnnnnnnnnnnnnnnnnnnnnnnnnnnnnnnnnnnnnnnnnnnnnnnnnnnnnnnnnnnnnnnnnnnnnnnnnnnnnnnnnnnnnnnnnnnnnnnnnnnnnnnnnnnnnnnnnnnnnnnnnnnnnnnnnnnnnnnnnnnnnnnnnnnnnnnnnnnnnnnnnnnnnnnnnnnnnnnnnnnnnnnnnnnnnnnnnnnnnnnnnnnnnnnnnnnnnnnnnnnnnnnnnnnnnnnnnnnnnnnnnnnnnnnnnnnnnnnnnnnnnnnnnnnnnnnnnnnnnnnnnnnnnnnnnnnnnnnnnnnnnnnnnnnnnnnnnnnnnnnnnnnnnnnnnnnnnnnnnnnnnnnnnnnnnnnnnnnnnnnnnnnnnnnnnnnnnnnnnnnnnnnnnnnnnnnnnnnnnnnnnnnnnnnnnnnnnnnnnnnnnnnnnnnnnnnnnnnnnnnnnnnnnnnnnnnnnnnnnnnnnnnnnnnnnnnnnnnnnnnnnnnnnnnnnnnnnnnnnnnnnnnnnnnnnnnnnnnnnnnnnnnnnnnnnnnnnnnnnnnnnnnnnnnnnnnnnnnnnnnnnnnnnnnnnnnnnnnnnnnnnnnnnnnnnnnnnnnnnnnnnnnnnnnnnnnnnnnnnnnnnnnnnnnnnnnnnnnnnnnnnnnnnnnnnnnnnnnnnnnnnnnnnnnnnnnnnnnnnnnnnnnnnnnnnnnnnnnnnnnnnnnnnnnnnnnnnnnnnnnnnnnnnnnnnnnnnnnnnnnnnnnnnnnnnnnnnnnnnnnnnnnnnnnnnnnnnnnnnnnnnnnnnnnnnnnnnnnnnnnnnnnnnnnnnnnnnnnnnnnnnnnnnnnnnnnnnnnnnnnnnnnnnnnnnnnnnnnnnnnnnnnnnnnnnnnnnnnnnnnnnnnnnnnnnnnnnnnnnnnnnnnnnnnnnnnnnnnnnnnnnnnnnnnnnnnnnnnnnnnnnnnnnnnnnnnnnnnnnnnnnnnnnnnnnnnnnnnnnnnnnnnnnnnnnnnnnnnnnnnnnnnnnnnnnnnnnnnnnnnnnnnnnnnnnnnnnnnnnnnnnnnnnnnnnnnnnnnnnnnnnnnnnnnnnnnnnnnnnnnnnnnnnnnnnnnnnnnnnnnnnnnnnnnnnnnnnnnnnnnnnnnnnnnnnnnnnnnnnnnnnnnnnnnnnnnnnnnnnnnnnnnnnnnnnnnnnnnnnnnnnnnnnnnnnnnnnnnnnnnnnnnnnnnnnnnnnnnnnnnnnnnnnnnnnnnnnnnnnnnnnnnnnnnnnnnnnnnnnnnnnnnnnnnnnnnnnnnnnnnnnnnnnnnnnnnnnnnnnnnnnnnnnnnnnnnnnnnnnnnnnnnnnnnnnnnnnnnnnnnnnnnnnnnnnnnnnnnnnnnnnnnnnnnnnnnnnnnnnnnnnnnnnnnnnnnnnnnnnnnnnnnnnnnnnnnnnnnnnnnnnnnnnnnnnnnnnnnnnnnnnnnnnnnnnnnnnnnnnnnnnnnnnnnnnnnnnnnnnnnnnnnnnnnnnnnnnnnnnnnnnnnnnnnnnnnnnnnnnnnnnnnnnnnnnnnnnnnnnnnnnnnnnnnnnnnnnnnnnnnnnnnnnnnnnnnnnnnnnnnnnnnnnnnnnnnnnnnnnnnnnnnnnnnnnnnnnnnnnnnnnnnnnnnnnnnnnnnnnnnnnnnnnnnnnnnnnnnnnnnnnnnnnnnnnnnnnnnnnnnnnnnnnnnnnnnnnnnnnnnnnnnnnnnnnnnnnnnnnnnnnnnnnnnnnnnnnnnnnnnnnnnnnnnnnnnnnnnnnnnnnnnnnnnnnnnnnnnnnnnnnnnnnnnnnnnnnnnnnnnnnnnnnnnnnnnnnnnnnnnnnnnnnnnnnnnnnnnnnnnnnnnnnnnnnnnnnnnnnnnnnnnnnnnnnnnnnnnnnnnnnnnnnnnnnnnnnnnnnnnnnnnnnnnnnnnnnnnnnnnnnnnnnnnnnnnnnnnnnnnnnnnnnnnnnnnnnnnnnnnnnnnnnnnnnnnnnnnnnnnnnnnnnnnnnnnnnnnnnnnnnnnnnnnnnnnnnnnnnnnnnnnnnnnnnnnnnnnnnnnnnnnnnnnnnnnnnnnnnnnnnnnnnnnnnnnnnnnnnnnnnnnnnnnnnnnnnnnnnnnnnnnnnnnnnnnnnnnnnnnnnnnnnnnnnnnnnnnnnnnnnnnnnnnnnnnnnnnnnnnnnnnnnnnnnnnnnnnnnnnnnnnnnnnnnnnnnnnnnnnnnnnnnnnnnnnnnnnnnnnnnnnnnnnnnnnnnnnnnnnnnnnnnnnnnnnnnnnnnnnnnnnnnnnnnnnnnnnnnnnnnnnnnnnnnnnnnnnnnnnnnnnnnnnnnnnnnnnnnnnnnnnnnnnnnnnnnnnnnnnnnnnnnnnnnnnnnnnnnnnnnnnnnnnnnnnnnnnnnnnnnnnnnnnnnnnnnnnnnnnnnnnnnnnnnnnnnnnnnnnnnnnnnnnnnnnnnnnnnnnnnnnnnnnnnnnnnnnnnnnnnnnnnnnnnnnnnnnnnnnnnnnnnnnnnnnnnnnnnnnnnnnnnnnnnnnnnnnnnnnnnnnnnnnnnnnnnnnnnnnnnnnnnnnnnnnnnnnnnnnnnnnnnnnnnnnnnnnnnnnnnnnnnnnnnnnnnnnnnnnnnnnnnnnnnnnnnnnnnnnnnnnnnnnnnnnnnnnnnnnnnnnnnnnnnnnnnnnnnnnnnnnnnnnnnnnnnnnnnnnnnnnnnnnnnnnnnnnnnnnnnnnnnnnnnnnnnnnnnnnnnnnnnnnnnnnnnnnnnnnnnnnnnnnnnnnnnnnnnnnnnnnnnnnnnnnnnnnnnnnnnnnnnnnnnnnnnnnnnnnnnnnnnnnnnnnnnnnnnnnnnnnnnnnnnnnnnnnnnnnnnnnnnnnnnnnnnnnnnnnnnnnnnnnnnnnnnnnnnnnnnnnnnnnnnnnnnnnnnnnnnnnnnnnnnnnnnnnnnnnnnnnnnnnnnnnnnnnnnnnnnnnnnnnnnnnnnnnnnnnnnnnnnnnnnnnnnnnnnnnnnnnnnnnnnnnnnnnnnnnnnnnnnnnnnnnnnnnnnnnnnnnnnnnnnnnnnnnnnnnnnnnnnnnnnnnnnnnnnnnnnnnnnnnnnnnnnnnnnnnnnnnnnnnnnnnnnnnnnnnnnnnnnnnnnnnnnnnnnnnnnnnnnnnnnnnnnnnnnnnnnnnnnnnnnnnnnnnnnnnnnnnnnnnnnnnnnnnnnnnnnnnnnnnnnnnnnnnnnnnnnnnnnnnnnnnnnnnnnnnnnnnnnnnnnnnnnnnnnnnnnnnnnnnnnnnnnnnnnnnnnnnnnnnnnnnnnnnnnnnnnnnnnnnnnnnnnnnnnnnnnnnnnnnnnnnnnnnnnnnnnnnnnnnnnnnnnnnnnnnnnnnnnnnnnnnnnnnnnnnnnnnnnnnnnnnnnnnnnnnnnnnnnnnnnnnnnnnnnnnnnnnnnnnnnnnnnnnnnnnnnnnnnnnnnnnnnnnnnnnnnnnnnnnnnnnnnnnnnnnnnnnnnnnnnnnnnnnnnnnnnnnnnnnnnnnnnnnnnnnnnnnnnnnnnnnnnnnnnnnnnnnnnnnnnnnnnnnnnnnnnnnnnnnnnnnnnnnnnnnnnnnnnnnnnnnnnnnnnnnnnnnnnnnnnnnnnnnnnnnnnnnnnnnnnnnnnnnnnnnnnnnnnnnnnnnnnnnnnnnnnnnnnnnnnnnnnnnnnnnnnnnnnnnnnnnnnnnnnnnnnnnnnnnnnnnnnnnnnnnnnnnnnnnnnnnnnnnnnnnnnnnnnnnnnnnnnnnnnnnnnnnnnnnnnnnnnnnnnnnnnnnnnnnnnnnnnnnnnnnnnnnnnnnnnnnnnnnnnnnnnnnnnnnnnnnnnnnnnnnnnnnnnnnnnnnnnnnnnnnnnnnnnnnnnnnnnnnnnnnnnnnnnnnnnnnnnnnnnnnnnnnnnnnnnnnnnnnnnnnnnnnnnnnnnnnnnnnnnnnnnnnnnnnnnnnnnnnnnnnnnnnnnnnnnnnnnnnnnnnnnnnnnnnnnnnnnnnnnnnnnnnnnnnnnnnnnnnnnnnnnnnnnnnnnnnnnnnnnnnnnnnnnnnnnnnnnnnnnnnnnnnnnnnnnnnnnnnnnnnnnnnnnnnnnnnnnnnnnnnnnnnnnnnnnnnnnnnnnnnnnnnnnnnnnnnnnnnnnnnnnnnnnnnnnnnnnnnnnnnnnnnnnnnnnnnnnnnnnnnnnnnnnnnnnnnnnnnnnnnnnnnnnnnnnnnnnnnnnnnnnnnnnnnnnnnnnnnnnnnnnnnnnnnnnnnnnnnnnnnnnnnnnnnnnnnnnnnnnnnnnnnnnnnnnnnnnnnnnnnnnnnnnnnnnnnnnnnnnnnnnnnnnnnnnnnnnnnnnnnnnnnnnnnnnnnnnnnnnnnnnnnnnnnnnnnnnnnnnnnnnnnnnnnnnnnnnnnnnnnnnnnnnnnnnnnnnnnnnnnnnnnnnnnnnnnnnnnnnnnnnnnnnnnnnnnnnnnnnnnnnnnnnnnnnnnnnnnnnnnnnnnnnnnnnnnnnnnnnnnnnnnnnnnnnnnnnnnnnnnnnnnnnnnnnnnnnnnnnnnnnnnnnnnnnnnnnnnnnnnnnnnnnnnnnnnnnnnnnnnnnnnnnnnnnnnnnnnnnnnnnnnnnnnnnnnnnnnnnnnnnnnnnnnnnnnnnnnnnnnnnnnnnnnnnnnnnnnnnnnnnnnnnnnnnnnnnnnnnnnnnnnnnnnnnnnnnnnnnnnnnnnnnnnnnnnnnnnnnnnnnnnnnnnnnnnnnnnnnnnnnnnnnnnnnnnnnnnnnnnnnnnnnnnnnnnnnnnnnnnnnnnnnnnnnnnnnnnnnnnnnnnnnnnnnnnnnnnnnnnnnnnnnnnnnnnnnnnnnnnnnnnnnnnnnnnnnnnnnnnnnnnnnnnnnnnnnnnnnnnnnnnnnnnnnnnnnnnnnnnnnnnnnnnnnnnnnnnnnnnnnnnnnnnnnnnnnnnnnnnnnnnnnnnnnnnnnnnnnnnnnnnnnnnnnnnnnnnnnnnnnnnnnnnnnnnnnnnnnnnnnnnnnnnnnnnnnnnnnnnnnnnnnnnnnnnnnnnnnnnnnnnnnnnnnnnnnnnnnnnnnnnnnnnnnnnnnnnnnnnnnnnnnnnnnnnnnnnnnnnnnnnnnnnnnnnnnnnnnnnnnnnnnnnnnnnnnnnnnnnnnnnnnnnnnnnnnnnnnnnnnnnnnnnnnnnnnnnnnnnnnnnnnnnnnnnnnnnnnnnnnnnnnnnnnnnnnnnnnnnnnnnnnnnnnnnnnnnnnnnnnnnnnnnnnnnnnnnnnnnnnnnnnnnnnnnnnnnnnnnnnnnnnnnnnnnnnnnnnnnnnnnnnnnnnnnnnnnnnnnnnnnnnnnnnnnnnnnnnnnnnnnnnnnnnnnnnnnnnnnnnnnnnnnnnnnnnnnnnnnnnnnnnnnnnnnnnnnnnnnnnnnnnnnnnnnnnnnnnnnnnnnnnnnnnnnnnnnnnnnnnnnnnnnnnnnnnnnnnnnnnnnnnnnnnnnnnnnnnnnnnnnnnnnnnnnnnnnnnnnnnnnnnnnnnnnnnnnnnnnnnnnnnnnnnnnnnnnnnnnnnnnnnnnnnnnnnnnnnnnnnnnnnnnnnnnnnnnnnnnnnnnnnnnnnnnnnnnnnnnnnnnnnnnnnnnnnnnnnnnnnnnnnnnnnnnnnnnnnnnnnnnnnnnnnnnnnnnnnnnnnnnnnnnnnnnnnnnnnnnnnnnnnnnnnnnnnnnnnnnnnnnnnnnnnnnnnnnnnnnnnnnnnnnnnnnnnnnnnnnnnnnnnnnnnnnnnnnnnnnnnnnnnnnnnnnnnnnnnnnnnnnnnnnnnnnnnnnnnnnnnnnnnnnnnnnnnnnnnnnnnnnnnnnnnnnnnnnnnnnnnnnnnnnnnnnnnnnnnnnnnnnnnnnnnnnnnnnnnnnnnnnnnnnnnnnnnnnnnnnnnnnnnnnnnnnnnnnnnnnnnnnnnnnnnnnnnnnnnnnnnnnnnnnnnnnnnnnnnnnnnnnnnnnnnnnnnnnnnnnnnnnnnnnnnnnnnnnnnnnnnnnnnnnnnnnnnnnnnnnnnnnnnnnnnnnnnnnnnnnnnnnnnnnnnnnnnnnnnnnnnnnnnnnnnnnnnnnnnnnnnnnnnnnnnnnnnnnnnnnnnnnnnnnnnnnnnnnnnnnnnnnnnnnnnnnnnnnnnnnnnnnnnnnnnnnnnnnnnnnnnnnnnnnnnnnnnnnnnnnnnnnnnnnnnnnnnnnnnnnnnnnnnnnnnnnnnnnnnnnnnnnnnnnnnnnnnnnnnnnnnnnnnnnnnnnnnnnnnnnnnnnnnnnnnnnnnnnnnnnnnnnnnnnnnnnnnnnnnnnnnnnnnnnnnnnnnnnnnnnnnnnnnnnnnnnnnnnnnnnnnnnnnnnnnnnnnnnnnnnnnnnnnnnnnnnnnnnnnnnnnnnnnnnnnnnnnnnnnnnnnnnnnnnnnnnnnnnnnnnnnnnnnnnnnnnnnnnnnnnnnnnnnnnnnnnnnnnnnnnnnnnnnnnnnnnnnnnnnnnnnnnnnnnnnnnnnnnnnnnnnnnnnnnnnnnnnnnnnnnnnnnnnnnnnnnnnnnnnnnnnnnnnnnnnnnnnnnnnnnnnnnnnnnnnnnnnnnnnnnnnnnnnnnnnnnnnnnnnnnnnnnnnnnnnnnnnnnnnnnnnnnnnnnnnnnnnnnnnnnnnnnnnnnnnnnnnnnnnnnnnnnnnnnnnnnnnnnnnnnnnnnnnnnnnnnnnnnnnnnnnnnnnnnnnnnnnnnnnnnnnnnnnnnnnnnnnnnnnnnnnnnnnnnnnnnnnnnnnnnnnnnnnnnnnnnnnnnnnnnnnnnnnnnnnnnnnnnnnnnnnnnnnnnnnnnnnnnnnnnnnnnnnnnnnnnnnnnnnnnnnnnnnnnnnnnnnnnnnnnnnnnnnnnnnnnnnnnnnnnnnnnnnnnnnnnnnnnnnnnnnnnnnnnnnnnnnnnnnnnnnnnnnnnnnnnnnnnnnnnnnnnnnnnnnnnnnnnnnnnnnnnnnnnnnnnnnnnnnnnnnnnnnnnnnnnnnnnnnnnnnnnnnnnnnnnnnnnnnnnnnnnnnnnnnnnnnnnnnnnnnnnnnnnnnnnnnnnnnnnnnnnnnnnnnnnnnnnnnnnnnnnnnnnnnnnnnnnnnnnnnnnnnnnnnnnnnnnnnnnnnnnnnnnnnnnnnnnnnnnnnnnnnnnnnnnnnnnnnnnnnnnnnnnnnnnnnnnnnnnnnnnnnnnnnnnnnnnnnnnnnnnnnnnnnnnnnnnnnnnnnnnnnnnnnnnnnnnnnnnnnnnnnnnnnnnnnnnnnnnnnnnnnnnnnnnnnnnnnnnnnnnnnnnnnnnnnnnnnnnnnnnnnnnnnnnnnnnnnnnnnnnnnnnnnnnnnnnnnnnnnnnnnnnnnnnnnnnnnnnnnnnnnnnnnnnnnnnnnnnnnnnnnnnnnnnnnnnnnnnnnnnnnnnnnnnnnnnnnnnnnnnnnnnnnnnnnnnnnnnnnnnnnnnnnnnnnnnnnnnnnnnnnnnnnnnnnnnnnnnnnnnnnnnnnnnnnnnnnnnnnnnnnnnnnnnnnnnnnnnnnnnnnnnnnnnnnnnnnnnnnnnnnnnnnnnnnnnnnnnnnnnnnnnnnnnnnnnnnnnnnnnnnnnnnnnnnnnnnnnnnnnnnnnnnnnnnnnnnnnnnnnnnnnnnnnnnnnnnnnnnnnnnnnnnnnnnnnnnnnnnnnnnnnnnnnnnnnnnnnnnnnnnnnnnnnnnnnnnnnnnnnnnnnnnnnnnnnnnnnnnnnnnnnnnnnnnnnnnnnnnnnnnnnnnnnnnnnnnnnnnnnnnnnnnnnnnnnnnnnnnnnnnnnnnnnnnnnnnnnnnnnnnnnnnnnnnnnnnnnnnnnnnnnnnnnnnnnnnnnnnnnnnnnnnnnnnnnnnnnnnnnnnnnnnnnnnnnnnnnnnnnnnnnnnnnnnnnnnnnnnnnnnnnnnnnnnnnnnnnnnnnnnnnnnnnnnnnnnnnnnnnnnnnnnnnnnnnnnnnnnnnnnnnnnnnnnnnnnnnnnnnnnnnnnnnnnnnnnnnnnnnnnnnnnnnnnnnnnnnnnnnnnnnnnnnnnnnnnnnnnnnnnnnnnnnnnnnnnnnnnnnnnnnnnnnnnnnnnnnnnnnnnnnnnnnnnnnnnnnnnnnnnnnnnnnnnnnnnnnnnnnnnnnnnnnnnnnnnnnnnnnnnnnnnnnnnnnnnnnnnnnnnnnnnnnnnnnnnnnnnnnnnnnnnnnnnnnnnnnnnnnnnnnnnnnnnnnnnnnnnnnnnnnnnnnnnnnnnnnnnnnnnnnnnnnnnnnnnnnnnnnnnnnnnnnnnnnnnnnnnnnnnnnnnnnnnnnnnnnnnnnnnnnnnnnnnnnnnnnnnnnnnnnnnnnnnnnnnnnnnnnnnnnnnnnnnnnnnnnnnnnnnnnnnnnnnnnnnnnnnnnnnnnnnnnnnnnnnnnnnnnnnnnnnnnnnnnnnnnnnnnnnnnnnnnnnnnnnnnnnnnnnnnnnnnnnnnnnnnnnnnnnnnnnnnnnnnnnnnnnnnnnnnnnnnnnnnnnnnnnnnnnnnnnnnnnnnnnnnnnnnnnnnnnnnnnnnnnnnnnnnnnnnnnnnnnnnnnnnnnnnnnnnnnnnnnnnnnnnnnnnnnnnnnnnnnnnnnnnnnnnnnnnnnnnnnnnnnnnnnnnnnnnnnnnnnnnnnnnnnnnnnnnnnnnnnnnnnnnnnnnnnnnnnnnnnnnnnnnnnnnnnnnnnnnnnnnnnnnnnnnnnnnnnnnnnnnnnnnnnnnnnnnnnnnnnnnnnnnnnnnnnnnnnnnnnnnnnnnnnnnnnnnnnnnnnnnnnnnnnnnnnnnnnnnnnnnnnnnnnnnnnnnnnnnnnnnnnnnnnnnnnnnnnnnnnnnnnnnnnnnnnnnnnnnnnnnnnnnnnnnnnnnnnnnnnnnnnnnnnnnnnnnnnnnnnnnnnnnnnnnnnnnnnnnnnnnnnnnnnnnnnnnnnnnnnnnnnnnnnnnnnnnnnnnnnnnnnnnnnnnnnnnnnnnnnnnnnnnnnnnnnnnnnnnnnnnnnnnnnnnnnnnnnnnnnnnnnnnnnnnnnnnnnnnnnnnnnnnnnnnnnnnnnnnnnnnnnnnnnnnnnnnnnnnnnnnnnnnnnnnnnnnnnnnnnnnnnnnnnnnnnnnnnnnnnnnnnnnnnnnnnnnnnnnnnnnnnnnnnnnnnnnnnnnnnnnnnnnnnnnnnnnnnnnnnnnnnnnnnnnnnnnnnnnnnnnnnnnnnnnnnnnnnnnnnnnnnnnnnnnnnnnnnnnnnnnnnnnnnnnnnnnnnnnnnnnnnnnnnnnnnnnnnnnnnnnnnnnnnnnnnnnnnnnnnnnnnnnnnnnnnnnnnnnnnnnnnnnnnnnnnnnnnnnnnnnnnnnnnnnnnnnnnnnnnnnnnnnnnnnnnnnnnnnnnnnnnnnnnnnnnnnnnnnnnnnnnnnnnnnnnnnnnnnnnnnnnnnnnnnnnnnnnnnnnnnnnnnnnnnnnnnnnnnnnnnnnnnnnnnnnnnnnnnnnnnnnnnnnnnnnnnnnnnnnnnnnnnnnnnnnnnnnnnnnnnnnnnnnnnnnnnnnnnnnnnnnnnnnnnnnnnnnnnnnnnnnnnnnnnnnnnnnnnnnnnnnnnnnnnnnnnnnnnnnnnnnnnnnnnnnnnnnnnnnnnnnnnnnnnnnnnnnnnnnnnnnnnnnnnnnnnnnnnnnnnnnnnnnnnnnnnnnnnnnnnnnnnnnnnnnnnnnnnnnnnnnnnnnnnnnnnnnnnnnnnnnnnnnnnnnnnnnnnnnnnnnnnnnnnnnnnnnnnnnnnnnnnnnnnnnnnnnnnnnnnnnnnnnnnnnnnnnnnnnnnnnnnnnnnnnnnnnnnnnnnnnnnnnnnnnnnnnnnnnnnnnnnnnnnnnnnnnnnnnnnnnnnnnnnnnnnnnnnnnnnnnnnnnnnnnnnnnnnnnnnnnnnnnnnnnnnnnnnnnnnnnnnnnnnnnnnnnnnnnnnnnnnnnnnnnnnnnnnnnnnnnnnnnnnnnnnnnnnnnnnnnnnnnnnnnnnnnnnnnnnnnnnnnnnnnnnnnnnnnnnnnnnnnnnnnnnnnnnnnnnnnnnnnnnnnnnnnnnnnnnnnnnnnnnnnnnnnnnnnnnnnnnnnnnnnnnnnnnnnnnnnnnnnnnnnnnnnnnnnnnnnnnnnnnnnnnnnnnnnnnnnnnnnnnnnnnnnnnnnnnnnnnnnnnnnnnnnnnnnnnnnnnnnnnnnnnnnnnnnnnnnnnnnnnnnnnnnnnnnnnnnnnnnnnnnnnnnnnnnnnnnnnnnnnnnnnnnnnnnnnnnnnnnnnnnnnnnnnnnnnnnnnnnnnnnnnnnnnnnnnnnnnnnnnnnnnnnnnnnnnnnnnnnnnnnnnnnnnnnnnnnnnnnnnnnnnnnnnnnnnnnnnnnnnnnnnnnnnnnnnnnnnnnnnnnnnnnnnnnnnnnnnnnnnnnnnnnnnnnnnnnnnnnnnnnnnnnnnnnnnnnnnnnnnnnnnnnnnnnnnnnnnnnnnnnnnnnnnnnnnnnnnnnnnnnnnnnnnnnnnnnnnnnnnnnnnnnnnnnnnnnnnnnnnnnnnnnnnnnnnnnnnnnnnnnnnnnnnnnnnnnnnnnnnnnnnnnnnnnnnnnnnnnnnnnnnnnnnnnnnnnnnnnnnnnnnnnnnnnnnnnnnnnnnnnnnnnnnnnnnnnnnnnnnnnnnnnnnnnnnnnnnnnnnnnnnnnnnnnnnnnnnnnnnnnnnnnnnnnnnnnnnnnnnnnnnnnnnnnnnnnnnnnnnnnnnnnnnnnnnnnnnnnnnnnnnnnnnnnnnnnnnnnnnnnnnnnnnnnnnnnnnnnnnnnnnnnnnnnnnnnnnnnnnnnnnnnnnnnnnnnnnnnnnnnnnnnnnnnnnnnnnnnnnnnnnnnnnnnnnnnnnnnnnnnnnnnnnnnnnnnnnnnnnnnnnnnnnnnnnnnnnnnnnnnnnnnnnnnnnnnnnnnnnnnnnnnnnnnnnnnnnnnnnnnnnnnnnnnnnnnnnnnnnnnnnnnnnnnnnnnnnnnnnnnnnnnnnnnnnnnnnnnnnnnnnnnnnnnnnnnnnnnnnnnnnnnnnnnnnnnnnnnnnnnnnnnnnnnnnnnnnnnnnnnnnnnnnnnnnnnnnnnnnnnnnnnnnnnnnnnnnnnnnnnnnnnnnnnnnnnnnnnnnnnnnnnnnnnnnnnnnnnnnnnnnnnnnnnnnnnnnnnnnnnnnnnnnnnnnnnnnnnnnnnnnnnnnnnnnnnnnnnnnnnnnnnnnnnnnnnnnnnnnnnnnnnnnnnnnnnnnnnnnnnnnnnnnnnnnnnnnnnnnnnnnnnnnnnnnnnnnnnnnnnnnnnnnnnnnnnnnnnnnnnnnnnnnnnnnnnnnnnnnnnnnnnnnnnnnnnnnnnnnnnnnnnnnnnnnnnnnnnnnnnnnnnnnnnnnnnnnnnnnnnnnnnnnnnnnnnnnnnnnnnnnnnnnnnnnnnnnnnnnnnnnnnnnnnnnnnnnnnnnnnnnnnnnnnnnnnnnnnnnnnnnnnnnnnnnnnnnnnnnnnnnnnnnnnnnnnnnnnnnnnnnnnnnnnnnnnnnnnnnnnnnnnnnnnnnnnnnnnnnnnnnnnnnnnnnnnnnnnnnnnnnnnnnnnnnnnnnnnnnnnnnnnnnnnnnnnnnnnnnnnnnnnnnnnnnnnnnnnnnnnnnnnnnnnnnnnnnnnnnnnnnnnnnnnnnnnnnnnnnnnnnnnnnnnnnnnnnnnnnnnnnnnnnnnnnnnnnnnnnnnnnnnnnnnnnnnnnnnnnnnnnnnnnnnnnnnnnnnnnnnnnnnnnnnnnnnnnnnnnnnnnnnnnnnnnnnnnnnnnnnnnnnnnnnnnnnnnnnnnnnnnnnnnnnnnnnnnnnnnnnnnnnnnnnnnnnnnnnnnnnnnnnnnnnnnnnnnnnnnnnnnnnnnnnnnnnnnnnnnnnnnnnnnnnnnnnnnnnnnnnnnnnnnnnnnnnnnnnnnnnnnnnnnnnnnnnnnnnnnnnnnnnnnnnnnnnnnnnnnnnnnnnnnnnnnnnnnnnnnnnnnnnnnnnnnnnnnnnnnnnnnnnnnnnnnnnnnnnnnnnnnnnnnnnnnnnnnnnnnnnnnnnnnnnnnnnnnnnnnnnnnnnnnnnnnnnnnnnnnnnnnnnnnnnnnnnnnnnnnnnnnnnnnnnnnnnnnnnnnnnnnnnnnnnnnnnnnnnnnnnnnnnnnnnnnnnnnnnnnnnnnnnnnnnnnnnnnnnnnnnnnnnnnnnnnnnnnnnnnnnnnnnnnnnnnnnnnnnnnnnnnnnnnnnnnnnnnnnnnnnnnnnnnnnnnnnnnnnnnnnnnnnnnnnnnnnnnnnnnnnnnnnnnnnnnnnnnnnnnnnnnnnnnnnnnnnnnnnnnnnnnnnnnnnnnnnnnnnnnnnnnnnnnnnnnnnnnnnnnnnnnnnnnnnnnnnnnnnnnnnnnnnnnnnnnnnnnnnnnnnnnnnnnnnnnnnnnnnnnnnnnnnnnnnnnnnnnnnnnnnnnnnnnnnnnnnnnnnnnnnnnnnnnnnnnnnnnnnnnnnnnnnnnnnnnnnnnnnnnnnnnnnnnnnnnnnnnnnnnnnnnnnnnnnnnnnnnnnnnnnnnnnnnnnnnnnnnnnnnnnnnnnnnnnnnnnnnnnnnnnnnnnnnnnnnnnnnnnnnnnnnnnnnnnnnnnnnnnnnnnnnnnnnnnnnnnnnnnnnnnnnnnnnnnnnnnnnnnnnnnnnnnnnnnnnnnnnnnnnnnnnnnnnnnnnnnnnnnnnnnnnnnnnnnnnnnnnnnnnnnnnnnnnnnnnnnnnnnnnnnnnnnnnnnnnnnnnnnnnnnnnnnnnnnnnnnnnnnnnnnnnnnnnnnnnnnnnnnnnnnnnnnnnnnnnnnnnnnnnnnnnnnnnnnnnnnnnnnnnnnnnnnnnnnnnnnnnnnnnnnnnnnnnnnnnnnnnnnnnnnnnnnnnnnnnnnnnnnnnnnnnnnnnnnnnnnnnnnnnnnnnnnnnnnnnnnnnnnnnnnnnnnnnnnnnnnnnnnnnnnnnnnnnnnnnnnnnnnnnnnnnnnnnnnnnnnnnnnnnnnnnnnnnnnnnnnnnnnnnnnnnnnnnnnnnnnnnnnnnnnnnnnnnnnnnnnnnnnnnnnnnnnnnnnnnnnnnnnnnnnnnnnnnnnnnnnnnnnnnnnnnnnnnnnnnnnnnnnnnnnnnnnnnnnnnnnnnnnnnnnnnnnnnnnnnnnnnnnnnnnnnnnnnnnnnnnnnnnnnnnnnnnnnnnnnnnnnnnnnnnnnnnnnnnnnnnnnnnnnnnnnnnnnnnnnnnnnnnnnnnnnnnnnnnnnnnnnnnnnnnnnnnnnnnnnnnnnnnnnnnnnnnnnnnnnnnnnnnnnnnnnnnnnnnnnnnnnnnnnnnnnnnnnnnnnnnnnnnnnnnnnnnnnnnnnnnnnnnnnnnnnnnnnnnnnnnnnnnnnnnnnnnnnnnnnnnnnnnnnnnnnnnnnnnnnnnnnnnnnnnnnnnnnnnnnnnnnnnnnnnnnnnnnnnnnnnnnnnnnnnnnnnnnnnnnnnnnnnnnnnnnnnnnnnnnnnnnnnnnnnnnnnnnnnnnnnnnnnnnnnnnnnnnnnnnnnnnnnnnnnnnnnnnnnnnnnnnnnnnnnnnnnnnnnnnnnnnnnnnnnnnnnnnnnnnnnnnnnnnnnnnnnnnnnnnnnnnnnnnnnnnnnnnnnnnnnnnnnnnnnnnnnnnnnnnnnnnnnnnnnnnnnnnnnnnnnnnnnnnnnnnnnnnnnnnnnnnnnnnnnnnnnnnnnnnnnnnnnnnnnnnnnnnnnnnnnnnnnnnnnnnnnnnnnnnnnnnnnnnnnnnnnnnnnnnnnnnnnnnnnnnnnnnnnnnnnnnnnnnnnnnnnnnnnnnnnnnnnnnnnnnnnnnnnnnnnnnnnnnnnnnnnnnnnnnnnnnnnnnnnnnnnnnnnnnnnnnnnnnnnnnnnnnnnnnnnnnnnnnnnnnnnnnnnnnnnnnnnnnnnnnnnnnnnnnnnnnnnnnnnnnnnnnnnnnnnnnnnnnnnnnnnnnnnnnnnnnnnnnnnnnnnnnnnnnnnnnnnnnnnnnnnnnnnnnnnnnnnnnnnnnnnnnnnnnnnnnnnnnnnnnnnnnnnnnnnnnnnnnnnnnnnnnnnnnnnnnnnnnnnnnnnnnnnnnnnnnnnnnnnnnnnnnnnnnnnnnnnnnnnnnnnnnnnnnnnnnnnnnnnnnnnnnnnnnnnnnnnnnnnnnnnnnnnnnnnnnnnnnnnnnnnnnnnnnnnnnnnnnnnnnnnnnnnnnnnnnnnnnnnnnnnnnnnnnnnnnnnnnnnnnnnnnnnnnnnnnnnnnnnnnnnnnnnnnnnnnnnnnnnnnnnnnnnnnnnnnnnnnnnnnnnnnnnnnnnnnnnnnnnnnnnnnnnnnnnnnnnnnnnnnnnnnnnnnnnnnnnnnnnnnnnnnnnnnnnnnnnnnnnnnnnnnnnnnnnnnnnnnnnnnnnnnnnnnnnnnnnnnnnnnnnnnnnnnnnnnnnnnnnnnnnnnnnnnnnnnnnnnnnnnnnnnnnnnnnnnnnnnnnnnnnnnnnnnnnnnnnnnnnnnnnnnnnnnnnnnnnnnnnnnnnnnnnnnnnnnnnnnnnnnnnnnnnnnnnnnnnnnnnnnnnnnnnnnnnnnnnnnnnnnnnnnnnnnnnnnnnnnnnnnnnnnnnnnnnnnnnnnnnnnnnnnnnnnnnnnnnnnnnnnnnnnnnnnnnnnnnnnnnnnnnnnnnnnnnnnnnnnnnnnnnnnnnnnnnnnnnnnnnnnnnnnnnnnnnnnnnnnnnnnnnnnnnnnnnnnnnnnnnnnnnnnnnnnnnnnnnnnnnnnnnnnnnnnnnnnnnnnnnnnnnnnnnnnnnnnnnnnnnnnnnnnnnnnnnnnnnnnnnnnnnnnnnnnnnnnnnnnnnnnnnnnnnnnnnnnnnnnnnnnnnnnnnnnnnnnnnnnnnnnnnnnnnnnnnnnnnnnnnnnnnnnnnnnnnnnnnnnnnnnnnnnnnnnnnnnnnnnnnnnnnnnnnnnnnnnnnnnnnnnnnnnnnnnnnnnnnnnnnnnnnnnnnnnnnnnnnnnnnnnnnnnnnnnnnnnnnnnnnnnnnnnnnnnnnnnnnnnnnnnnnnnnnnnnnnnnnnnnnnnnnnnnnnnnnnnnnnnnnnnnnnnnnnnnnnnnnnnnnnnnnnnnnnnnnnnnnnnnnnnnnnnnnnnnnnnnnnnnnnnnnnnnnnnnnnnnnnnnnnnnnnnnnnnnnnnnnnnnnnnnnnnnnnnnnnnnnnnnnnnnnnnnnnnnnnnnnnnnnnnnnnnnnnnnnnnnnnnnnnnnnnnnnnnnnnnnnnnnnnnnnnnnnnnnnnnnnnnnnnnnnnnnnnnnnnnnnnnnnnnnnnnnnnnnnnnnnnnnnnnnnnnnnnnnnnnnnnnnnnnnnnnnnnnnnnnnnnnnnnnnnnnnnnnnnnnnnnnnnnnnnnnnnnnnnnnnnnnnnnnnnnnnnnnnnnnnnnnnnnnnnnnnnnnnnnnnnnnnnnnnnnnnnnnnnnnnnnnnnnnnnnnnnnnnnnnnnnnnnnnnnnnnnnnnnnnnnnnnnnnnnnnnnnnnnnnnnnnnnnnnnnnnnnnnnnnnnnnnnnnnnnnnnnnnnnnnnnnnnnnnnnnnnnnnnnnnnnnnnnnnnnnnnnnnnnnnnnnnnnnnnnnnnnnnnnnnnnnnnnnnnnnnnnnnnnnnnnnnnnnnnnnnnnnnnnnnnnnnnnnnnnnnnnnnnnnnnnnnnnnnnnnnnnnnnnnnnnnnnnnnnnnnnnnnnnnnnnnnnnnnnnnnnnnnnnnnnnnnnnnnnnnnnnnnnnnnnnnnnnnnnnnnnnnnnnnnnnnnnnnnnnnnnnnnnnnnnnnnnnnnnnnnnnnnnnnnnnnnnnnnnnnnnnnnnnnnnnnnnnnnnnnnnnnnnnnnnnnnnnnnnnnnnnnnnnnnnnnnnnnnnnnnnnnnnnnnnnnnnnnnnnnnnnnnnnnnnnnnnnnnnnnnnnnnnnnnnnnnnnnnnnnnnnnnnnnnnnnnnnnnnnnnnnnnnnnnnnnnnnnnnnnnnnnnnnnnnnnnnnnnnnnnnnnnnnnnnnnnnnnnnnnnnnnnnnnnnnnnnnnnnnnnnnnnnnnnnnnnnnnnnnnnnnnnnnnnnnnnnnnnnnnnnnnnnnnnnnnnnnnnnnnnnnnnnnnnnnnnnnnnnnnnnnnnnnnnnnnnnnnnnnnnnnnnnnnnnnnnnnnnnnnnnnnnnnnnnnnnnnnnnnnnnnnnnnnnnnnnnnnnnnnnnnnnnnnnnnnnnnnnnnnnnnnnnnnnnnnnnnnnnnnnnnnnnnnnnnnnnnnnnnnnnnnnnnnnnnnnnnnnnnnnnnnnnnnnnnnnnnnnnnnnnnnnnnnnnnnnnnnnnnnnnnnnnnnnnnnnnnnnnnnnnnnnnnnnnnnnnnnnnnnnnnnnnnnnnnnnnnnnnnnnnnnnnnnnnnnnnnnnnnnnnnnnnnnnnnnnnnnnnnnnnnnnnnnnnnnnnnnnnnnnnnnnnnnnnnnnnnnnnnnnnnnnnnnnnnnnnnnnnnnnnnnnnnnnnnnnnnnnnnnnnnnnnnnnnnnnnnnnnnnnnnnnnnnnnnnnnnnnnnnnnnnnnnnnnnnnnnnnnnnnnnnnnnnnnnnnnnnnnnnnnnnnnnnnnnnnnnnnnnnnnnnnnnnnnnnnnnnnnnnnnnnnnnnnnnnnnnnnnnnnnnnnnnnnnnnnnnnnnnnnnnnnnnnnnnnnnnnnnnnnnnnnnnnnnnnnnnnnnnnnnnnnnnnnnnnnnnnnnnnnnnnnnnnnnnnnnnnnnnnnnnnnnnnnnnnnnnnnnnnnnnnnnnnnnnnnnnnnnnnnnnnnnnnnnnnnnnnnnnnnnnnnnnnnnnnnnnnnnnnnnnnnnnnnnnnnnnnnnnnnnnnnnnnnnnnnnnnnnnnnnnnnnnnnnnnnnnnnnnnnnnnnnnnnnnnnnnnnnnnnnnnnnnnnnnnnnnnnnnnnnnnnnnnnnnnnnnnnnnnnnnnnnnnnnnnnnnnnnnnnnnnnnnnnnnnnnnnnnnnnnnnnnnnnnnnnnnnnnnnnnnnnnnnnnnnnnnnnnnnnnnnnnnnnnnnnnnnnnnnnnnnnnnnnnnnnnnnnnnnnnnnnnnnnnnnnnnnnnnnnnnnnnnnnnnnnnnnnnnnnnnnnnnnnnnnnnnnnnnnnnnnnnnnnnnnnnnnnnnnnnnnnnnnnnnnnnnnnnnnnnnnnnnnnnnnnnnnnnnnnnnnnnnnnnnnnnnnnnnnnnnnnnnnnnnnnnnnnnnnnnnnnnnnnnnnnnnnnnnnnnnnnnnnnnnnnnnnnnnnnnnnnnnnnnnnnnnnnnnnnnnnnnnnnnnnnnnnnnnnnnnnnnnnnnnnnnnnnnnnnnnnnnnnnnnnnnnnnnnnnnnnnnnnnnnnnnnnnnnnnnnnnnnnnnnnnnnnnnnnnnnnnnnnnnnnnnnnnnnnnnnnnnnnnnnnnnnnnnnnnnnnnnnnnnnnnnnnnnnnnnnnnnnnnnnnnnnnnnnnnnnnnnnnnnnnnnnnnnnnnnnnnnnnnnnnnnnnnnnnnnnnnnnnnnnnnnnnnnnnnnnnnnnnnnnnnnnnnnnnnnnnnnnnnnnnnnnnnnnnnnnnnnnnnnnnnnnnnnnnnnnnnnnnnnnnnnnnnnnnnnnnnnnnnnnnnnnnnnnnnnnnnnnnnnnnnnnnnnnnnnnnnnnnnnnnnnnnnnnnnnnnnnnnnnnnnnnnnnnnnnnnnnnnnnnnnnnnnnnnnnnnnnnnnnnnnnnnnnnnnnnnnnnnnnnnnnnnnnnnnnnnnnnnnnnnnnnnnnnnnnnnnnnnnnnnnnnnnnnnnnnnnnnnnnnnnnnnnnnnnnnnnnnnnnnnnnnnnnnnnnnnnnnnnnnnnnnnnnnnnnnnnnnnnnnnnnnnnnnnnnnnnnnnnnnnnnnnnnnnnnnnnnnnnnnnnnnnnnnnnnnnnnnnnnnnnnnnnnnnnnnnnnnnnnnnnnnnnnnnnnnnnnnnnnnnnnnnnnnnnnnnnnnnnnnnnnnnnnnnnnnnnnnnnnnnnnnnnnnnnnnnnnnnnnnnnnnnnnnnnnnnnnnnnnnnnnnnnnnnnnnnnnnnnnnnnnnnnnnnnnnnnnnnnnnnnnnnnnnnnnnnnnnnnnnnnnnnnnnnnnnnnnnnnnnnnnnnnnnnnnnnnnnnnnnnnnnnnnnnnnnnnnnnnnnnnnnnnnnnnnnnnnnnnnnnnnnnnnnnnnnnnnnnnnnnnnnnnnnnnnnnnnnnnnnnnnnnnnnnnnnnnnnnnnnnnnnnnnnnnnnnnnnnnnnnnnnnnnnnnnnnnnnnnnnnnnnnnnnnnnnnnnnnnnnnnnnnnnnnnnnnnnnnnnnnnnnnnnnnnnnnnnnnnnnnnnnnnnnnnnnnnnnnnnnnnnnnnnnnnnnnnnnnnnnnnnnnnnnnnnnnnnnnnnnnnnnnnnnnnnnnnnnnnnnnnnnnnnnnnnnnnnnnnnnnnnnnnnnnnnnnnnnnnnnnnnnnnnnnnnnnnnnnnnnnnnnnnnnnnnnnnnnnnnnnnnnnnnnnnnnnnnnnnnnnnnnnnnnnnnnnnnnnnnnnnnnnnnnnnnnnnnnnnnnnnnnnnnnnnnnnnnnnnnnnnnnnnnnnnnnnnnnnnnnnnnnnnnnnnnnnnnnnnnnnnnnnnnnnnnnnnnnnnnnnnnnnnnnnnnnnnnnnnnnnnnnnnnnnnnnnnnnnnnnnnnnnnnnnnnnnnnnnnnnnnnnnnnnnnnnnnnnnnnnnnnnnnnnnnnnnnnnnnnnnnnnnnnnnnnnnnnnnnnnnnnnnnnnnnnnnnnnnnnnnnnnnnnnnnnnnnnnnnnnnnnnnnnnnnnnnnnnnnnnnnnnnnnnnnnnnnnnnnnnnnnnnnnnnnnnnnnnnnnnnnnnnnnnnnnnnnnnnnnnnnnnnnnnnnnnnnnnnnnnnnnnnnnnnnnnnnnnnnnnnnnnnnnnnnnnnnnnnnnnnnnnnnnnnnnnnnnnnnnnnnnnnnnnnnnnnnnnnnnnnnnnnnnnnnnnnnnnnnnnnnnnnnnnnnnnnnnnnnnnnnnnnnnnnnnnnnnnnnnnnnnnnnnnnnnnnnnnnnnnnnnnnnnnnnnnnnnnnnnnnnnnnnnnnnnnnnnnnnnnnnnnnnnnnnnnnnnnnnnnnnnnnnnnnnnnnnnnnnnnnnnnnnnnnnnnnnnnnnnnnnnnnnnnnnnnnnnnnnnnnnnnnnnnnnnnnnnnnnnnnnnnnnnnnnnnnnnnnnnnnnnnnnnnnnnnnnnnnnnnnnnnnnnnnnnnnnnnnnnnnnnnnnnnnnnnnnnnnnnnnnnnnnnnnnnnnnnnnnnnnnnnnnnnnnnnnnnnnnnnnnnnnnnnnnnnnnnnnnnnnnnnnnnnnnnnnnnnnnnnnnnnnnnnnnnnnnnnnnnnnnnnnnnnnnnnnnnnnnnnnnnnnnnnnnnnnnnnnnnnnnnnnnnnnnnnnnnnnnnnnnnnnnnnnnnnnnnnnnnnnnnnnnnnnnnnnnnnnnnnnnnnnnnnnnnnnnnnnnnnnnnnnnnnnnnnnnnnnnnnnnnnnnnnnnnnnnnnnnnnnnnnnnnnnnnnnnnnnnnnnnnnnnnnnnnnnnnnnnnnnnnnnnnnnnnnnnnnnnnnnnnnnnnnnnnnnnnnnnnnnnnnnnnnnnnnnnnnnnnnnnnnnnnnnnnnnnnnnnnnnnnnnnnnnnnnnnnnnnnnnnnnnnnnnnnnnnnnnnnnnnnnnnnnnnnnnnnnnnnnnnnnnnnnnnnnnnnnnnnnnnnnnnnnnnnnnnnnnnnnnnnnnnnnnnnnnnnnnnnnnnnnnnnnnnnnnnnnnnnnnnnnnnnnnnnnnnnnnnnnnnnnnnnnnnnnnnnnnnnnnnnnnnnnnnnnnnnnnnnnnnnnnnnnnnnnnnnnnnnnnnnnnnnnnnnnnnnnnnnnnnnnnnnnnnnnnnnnnnnnnnnnnnnnnnnnnnnnnnnnnnnnnnnnnnnnnnnnnnnnnnnnnnnnnnnnnnnnnnnnnnnnnnnnnnnnnnnnnnnnnnnnnnnnnnnnnnnnnnnnnnnnnnnnnnnnnnnnnnnnnnnnnnnnnnnnnnnnnnnnnnnnnnnnnnnnnnnnnnnnnnnnnnnnnnnnnnnnnnnnnnnnnnnnnnnnnnnnnnnnnnnnnnnnnnnnnnnnnnnnnnnnnnnnnnnnnnnnnnnnnnnnnnnnnnnnnnnnnnnnnnnnnnnnnnnnnnnnnnnnnnnnnnnnnnnnnnnnnnnnnnnnnnnnnnnnnnnnnnnnnnnnnnnnnnnnnnnnnnnnnnnnnnnnnnnnnnnnnnnnnnnnnnnnnnnnnnnnnnnnnnnnnnnnnnnnnnnnnnnnnnnnnnnnnnnnnnnnnnnnnnnnnnnnnnnnnnnnnnnnnnnnnnnnnnnnnnnnnnnnnnnnnnnnnnnnnnnnnnnnnnnnnnnnnnnnnnnnnnnnnnnnnnnnnnnnnnnnnnnnnnnnnnnnnnnnnnnnnnnnnnnnnnnnnnnnnnnnnnnnnnnnnnnnnnnnnnnnnnnnnnnnnnnnnnnnnnnnnnnnnnnnnnnnnnnnnnnnnnnnnnnnnnnnnnnnnnnnnnnnnnnnnnnnnnnnnnnnnnnnnnnnnnnnnnnnnnnnnnnnnnnnnnnnnnnnnnnnnnnnnnnnnnnnnnnnnnnnnnnnnnnnnnnnnnnnnnnnnnnnnnnnnnnnnnnnnnnnnnnnnnnnnnnnnnnnnnnnnnnnnnnnnnnnnnnnnnnnnnnnnnnnnnnnnnnnnnnnnnnnnnnnnnnnnnnnnnnnnnnnnnnnnnnnnnnnnnnnnnnnnnnnnnnnnnnnnnnnnnnnnnnnnnnnnnnnnnnnnnnnnnnnnnnnnnnnnnnnnnnnnnnnnnnnnnnnnnnnnnnnnnnnnnnnnnnnnnnnnnnnnnnnnnnnnnnnnnnnnnnnnnnnnnnnnnnnnnnnnnnnnnnnnnnnnnnnnnnnnnnnnnnnnnnnnnnnnnnnnnnnnnnnnnnnnnnnnnnnnnnnnnnnnnnnnnnnnnnnnnnnnnnnnnnnnnnnnnnnnnnnnnnnnnnnnnnnnnnnnnnnnnnnnnnnnnnnnnnnnnnnnnnnnnnnnnnnnnnnnnnnnnnnnnnnnnnnnnnnnnnnnnnnnnnnnnnnnnnnnnnnnnnnnnnnnnnnnnnnnnnnnnnnnnnnnnnnnnnnnnnnnnnnnnnnnnnnnnnnnnnnnnnnnnnnnnnnnnnnnnnnnnnnnnnnnnnnnnnnnnnnnnnnnnnnnnnnnnnnnnnnnnnnnnnnnnnnnnnnnnnnnnnnnnnnnnnnnnnnnnnnnnnnnnnnnnnnnnnnnnnnnnnnnnnnnnnnnnnnnnnnnnnnnnnnnnnnnnnnnnnnnnnnnnnnnnnnnnnnnnnnnnnnnnnnnnnnnnnnnnnnnnnnnnnnnnnnnnnnnnnnnnnnnnnnnnnnnnnnnnnnnnnnnnnnnnnnnnnnnnnnnnnnnnnnnnnnnnnnnnnnnnnnnnnnnnnnnnnnnnnnnnnnnnnnnnnnnnnnnnnnnnnnnnnnnnnnnnnnnnnnnnnnnnnnnnnnnnnnnnnnnnnnnnnnnnnnnnnnnnnnnnnnnnnnnnnnnnnnnnnnnnnnnnnnnnnnnnnnnnnnnnnnnnnnnnnnnnnnnnnnnnnnnnnnnnnnnnnnnnnnnnnnnnnnnnnnnnnnnnnnnnnnnnnnnnnnnnnnnnnnnnnnnnnnnnnnnnnnnnnnnnnnnnnnnnnnnnnnnnnnnnnnnnnnnnnnnnnnnnnnnnnnnnnnnnnnnnnnnnnnnnnnnnnnnnnnnnnnnnnnnnnnnnnnnnnnnnnnnnnnnnnnnnnnnnnnnnnnnnnnnnnnnnnnnnnnnnnnnnnnnnnnnnnnnnnnnnnnnnnnnnnnnnnnnnnnnnnnnnnnnnnnnnnnnnnnnnnnnnnnnnnnnnnnnnnnnnnnnnnnnnnnnnnnnnnnnnnnnnnnnnnnnnnnnnnnnnnnnnnnnnnnnnnnnnnnnnnnnnnnnnnnnnnnnnnnnnnnnnnnnnnnnnnnnnnnnnnnnnnnnnnnnnnnnnnnnnnnnnnnnnnnnnnnnnnnnnnnnnnnnnnnnnnnnnnnnnnnnnnnnnnnnnnnnnnnnnnnnnnnnnnnnnnnnnnnnnnnnnnnnnnnnnnnnnnnnnnnnnnnnnnnnnnnnnnnnnnnnnnnnnnnnnnnnnnnnnnnnnnnnnnnnnnnnnnnnnnnnnnnnnnnnnnnnnnnnnnnnnnnnnnnnnnnnnnnnnnnnnnnnnnnnnnnnnnnnnnnnnnnnnnnnnnnnnnnnnnnnnnnnnnnnnnnnnnnnnnnnnnnnnnnnnnnnnnnnnnnnnnnnnnnnnnnnnnnnnnnnnnnnnnnnnnnnnnnnnnnnnnnnnnnnnnnnnnnnnnnnnnnnnnnnnnnnnnnnnnnnnnnnnnnnnnnnnnnnnnnnnnnnnnnnnnnnnnnnnnnnnnnnnnnnnnnnnnnnnnnnnnnnnnnnnnnnnnnnnnnnnnnnnnnnnnnnnnnnnnnnnnnnnnnnnnnnnnnnnnnnnnnnnnnnnnnnnnnnnnnnnnnnnnnnnnnnnnnnnnnnnnnnnnnnnnnnnnnnnnnnnnnnnnnnnnnnnnnnnnnnnnnnnnnnnnnnnnnnnnnnnnnnnnnnnnnnnnnnnnnnnnnnnnnnnnnnnnnnnnnnnnnnnnnnnnnnnnnnnnnnnnnnnnnnnnnnnnnnnnnnnnnnnnnnnnnnnnnnnnnnnnnnnnnnnnnnnnnnnnnnnnnnnnnnnnnnnnnnnnnnnnnnnnnnnnnnnnnnnnnnnnnnnnnnnnnnnnnnnnnnnnnnnnnnnnnnnnnnnnnnnnnnnnnnnnnnnnnnnnnnnnnnnnnnnnnnnnnnnnnnnnnnnnnnnnnnnnnnnnnnnnnnnnnnnnnnnnnnnnnnnnnnnnnnnnnnnnnnnnnnnnnnnnnnnnnnnnnnnnnnnnnnnnnnnnnnnnnnnnnnnnnnnnnnnnnnnnnnnnnnnnnnnnnnnnnnnnnnnnnnnnnnnnnnnnnnnnnnnnnnnnnnnnnnnnnnnnnnnnnnnnnnnnnnnnnnnnnnnnnnnnnnnnnnnnnnnnnnnnnnnnnnnnnnnnnnnnnnnnnnnnnnnnnnnnnnnnnnnnnnnnnnnnnnnnnnnnnnnnnnnnnnnnnnnnnnnnnnnnnnnnnnnnnnnnnnnnnnnnnnnnnnnnnnnnnnnnnnnnnnnnnnnnnnnnnnnnnnnnnnnnnnnnnnnnnnnnnnnnnnnnnnnnnnnnnnnnnnnnnnnnnnnnnnnnnnnnnnnnnnnnnnnnnnnnnnnnnnnnnnnnnnnnnnnnnnnnnnnnnnnnnnnnnnnnnnnnnnnnnnnnnnnnnnnnnnnnnnnnnnnnnnnnnnnnnnnnnnnnnnnnnnnnnnnnnnnnnnnnnnnnnnnnnnnnnnnnnnnnnnnnnnnnnnnnnnnnnnnnnnnnnnnnnnnnnnnnnnnnnnnnnnnnnnnnnnnnnnnnnnnnnnnnnnnnnnnnnnnnnnnnnnnnnnnnnnnnnnnnnnnnnnnnnnnnnnnnnnnnnnnnnnnnnnnnnnnnnnnnnnnnnnnnnnnnnnnnnnnnnnnnnnnnnnnnnnnnnnnnnnnnnnnnnnnnnnnnnnnnnnnnnnnnnnnnnnnnnnnnnnnnnnnnnnnnnnnnnnnnnnnnnnnnnnnnnnnnnnnnnnnnnnnnnnnnnnnnnnnnnnnnnnnnnnnnnnnnnnnnnnnnnnnnnnnnnnnnnnnnnnnnnnnnnnnnnnnnnnnnnnnnnnnnnnnnnnnnnnnnnnnnnnnnnnnnnnnnnnnnnnnnnnnnnnnnnnnnnnnnnnnnnnnnnnnnnnnnnnnnnnnnnnnnnnnnnnnnnnnnnnnnnnnnnnnnnnnnnnnnnnnnnnnnnnnnnnnnnnnnnnnnnnnnnnnnnnnnnnnnnnnnnnnnnnnnnnnnnnnnnnnnnnnnnnnnnnnnnnnnnnnnnnnnnnnnnnnnnnnnnnnnnnnnnnnnnnnnnnnnnnnnnnnnnnnnnnnnnnnnnnnnnnnnnnnnnnnnnnnnnnnnnnnnnnnnnnnnnnnnnnnnnnnnnnnnnnnnnnnnnnnnnnnnnnnnnnnnnnnnnnnnnnnnnnnnnnnnnnnnnnnnnnnnnnnnnnnnnnnnnnnnnnnnnnnnnnnnnnnnnnnnnnnnnnnnnnnnnnnnnnnnnnnnnnnnnnnnnnnnnnnnnnnnnnnnnnnnnnnnnnnnnnnnnnnnnnnnnnnnnnnnnnnnnnnnnnnnnnnnnnnnnnnnnnnnnnnnnnnnnnnnnnnnnnnnnnnnnnnnnnnnnnnnnnnnnnnnnnnnnnnnnnnnnnnnnnnnnnnnnnnnnnnnnnnnnnnnnnnnnnnnnnnnnnnnnnnnnnnnnnnnnnnnnnnnnnnnnnnnnnnnnnnnnnnnnnnnnnnnnnnnnnnnnnnnnnnnnnnnnnnnnnnnnnnnnnnnnnnnnnnnnnnnnnnnnnnnnnnnnnnnnnnnnnnnnnnnnnnnnnnnnnnnnnnnnnnnnnnnnnnnnnnnnnnnnnnnnnnnnnnnnnnnnnnnnnnnnnnnnnnnnnnnnnnnnnnnnnnnnnnnnnnnnnnnnnnnnnnnnnnnnnnnnnnnnnnnnnnnnnnnnnnnnnnnnnnnnnnnnnnnnnnnnnnnnnnnnnnnnnnnnnnnnnnnnnnnnnnnnnnnnnnnnnnnnnnnnnnnnnnnnnnnnnnnnnnnnnnnnnnnnnnnnnnnnnnnnnnnnnnnnnnnnnnnnnnnnnnnnnnnnnnnnnnnnnnnnnnnnnnnnnnnnnnnnnnnnnnnnnnnnnnnnnnnnnnnnnnnnnnnnnnnnnnnnnnnnnnnnnnnnnnnnnnnnnnnnnnnnnnnnnnnnnnnnnnnnnnnnnnnnnnnnnnnnnnnnnnnnnnnnnnnnnnnnnnnnnnnnnnnnnnnnnnnnnnnnnnnnnnnnnnnnnnnnnnnnnnnnnnnnnnnnnnnnnnnnnnnnnnnnnnnnnnnnnnnnnnnnnnnnnnnnnnnnnnnnnnnnnnnnnnnnnnnnnnnnnnnnnnnnnnnnnnnnnnnnnnnnnnnnnnnnnnnnnnnnnnnnnnnnnnnnnnnnnnnnnnnnnnnnnnnnnnnnnnnnnnnnnnnnnnnnnnnnnnnnnnnnnnnnnnnnnnnnnnnnnnnnnnnnnnnnnnnnnnnnnnnnnnnnnnnnnnnnnnnnnnnnnnnnnnnnnnnnnnnnnnnnnnnnnnnnnnnnnnnnnnnnnnnnnnnnnnnnnnnnnnnnnnnnnnnnnnnnnnnnnnnnnnnnnnnnnnnnnnnnnnnnnnnnnnnnnnnnnnnnnnnnnnnnnnnnnnnnnnnnnnnnnnnnnnnnnnnnnnnnnnnnnnnnnnnnnnnnnnnnnnnnnnnnnnnnnnnnnnnnnnnnnnnnnnnnnnnnnnnnnnnnnnnnnnnnnnnnnnnnnnnnnnnnnnnnnnnnnnnnnnnnnnnnnnnnnnnnnnnnnnnnnnnnnnnnnnnnnnnnnnnnnnnnnnnnnnnnnnnnnnnnnnnnnnnnnnnnnnnnnnnnnnnnnnnnnnnnnnnnnnnnnnnnnnnnnnnnnnnnnnnnnnnnnnnnnnnnnnnnnnnnnnnnnnnnnnnnnnnnnnnnnnnnnnnnnnnnnnnnnnnnnnnnnnnnnnnnnnnnnnnnnnnnnnnnnnnnnnnnnnnnnnnnnnnnnnnnnnnnnnnnnnnnnnnnnnnnnnnnnnnnnnnnnnnnnnnnnnnnnnnnnnnnnnnnnnnnnnnnnnnnnnnnnnnnnnnnnnnnnnnnnnnnnnnnnnnnnnnnnnnnnnnnnnnnnnnnnnnnnnnnnnnnnnnnnnnnnnnnnnnnnnnnnnnnnnnnnnnnnnnnnnnnnnnnnnnnnnnnnnnnnnnnnnnnnnnnnnnnnnnnnnnnnnnnnnnnnnnnnnnnnnnnnnnnnnnnnnnnnnnnnnnnnnnnnnnnnnnnnnnnnnnnnnnnnnnnnnnnnnnnnnnnnnnnnnnnnnnnnnnnnnnnnnnnnnnnnnnnnnnnnnnnnnnnnnnnnnnnnnnnnnnnnnnnnnnnnnnnnnnnnnnnnnnnnnnnnnnnnnnnnnnnnnnnnnnnnnnnnnnnnnnnnnnnnnnnnnnnnnnnnnnnnnnnnnnnnnnnnnnnnnnnnnnnnnnnnnnnnnnnnnnnnnnnnnnnnnnnnnnnnnnnnnnnnnnnnnnnnnnnnnnnnnnnnnnnnnnnnnnnnnnnnnnnnnnnnnnnnnnnnnnnnnnnnnnnnnnnnnnnnnnnnnnnnnnnnnnnnnnnnnnnnnnnnnnnnnnnnnnnnnnnnnnnnnnnnnnnnnnnnnnnnnnnnnnnnnnnnnnnnnnnnnnnnnnnnnnnnnnnnnnnnnnnnnnnnnnnnnnnnnnnnnnnnnnnnnnnnnnnnnnnnnnnnnnnnnnnnnnnnnnnnnnnnnnnnnnnnnnnnnnnnnnnnnnnnnnnnnnnnnnnnnnnnnnnnnnnnnnnnnnnnnnnnnnnnnnnnnnnnnnnnnnnnnnnnnnnnnnnnnnnnnnnnnnnnnnnnnnnnnnnnnnnnnnnnnnnnnnnnnnnnnnnnnnnnnnnnnnnnnnnnnnnnnnnnnnnnnnnnnnnnnnnnnnnnnnnnnnnnnnnnnnnnnnnnnnnnnnnnnnnnnnnnnnnnnnnnnnnnnnnnnnnnnnnnnnnnnnnnnnnnnnnnnnnnnnnnnnnnnnnnnnnnnnnnnnnnnnnnnnnnnnnnnnnnnnnnnnnnnnnnnnnnnnnnnnnnnnnnnnnnnnnnnnnnnnnnnnnnnnnnnnnnnnnnnnnnnnnnnnnnnnnnnnnnnnnnnnnnnnnnnnnnnnnnnnnnnnnnnnnnnnnnnnnnnnnnnnnnnnnnnnnnnnnnnnnnnnnnnnnnnnnnnnnnnnnnnnnnnnnnnnnnnnnnnnnnnnnnnnnnnnnnnnnnnnnnnnnnnnnnnnnnnnnnnnnnnnnnnnnnnnnnnnnnnnnnnnnnnnnnnnnnnnnnnnnnnnnnnnnnnnnnnnnnnnnnnnnnnnnnnnnnnnnnnnnnnnnnnnnnnnnnnnnnnnnnnnnnnnnnnnnnnnnnnnnnnnnnnnnnnnnnnnnnnnnnnnnnnnnnnnnnnnnnnnnnnnnnnnnnnnnnnnnnnnnnnnnnnnnnnnnnnnnnnnnnnnnnnnnnnnnnnnnnnnnnnnnnnnnnnnnnnnnnnnnnnnnnnnnnnnnnnnnnnnnnnnnnnnnnnnnnnnnnnnnnnnnnnnnnnnnnnnnnnnnnnnnnnnnnnnnnnnnnnnnnnnnnnnnnnnnnnnnnnnnnnnnnnnnnnnnnnnnnnnnnnnnnnnnnnnnnnnnnnnnnnnnnnnnnnnnnnnnnnnnnnnnnnnnnnnnnnnnnnnnnnnnnnnnnnnnnnnnnnnnnnnnnnnnnnnnnnnnnnnnnnnnnnnnnnnnnnnnnnnnnnnnnnnnnnnnnnnnnnnnnnnnnnnnnnnnnnnnnnnnnnnnnnnnnnnnnnnnnnnnnnnnnnnnnnnnnnnnnnnnnnnnnnnnnnnnnnnnnnnnnnnnnnnnnnnnnnnnnnnnnnnnnnnnnnnnnnnnnnnnnnnnnnnnnnnnnnnnnnnnnnnnnnnnnnnnnnnnnnnnnnnnnnnnnnnnnnnnnnnnnnnnnnnnnnnnnnnnnnnnnnnnnnnnnnnnnnnnnnnnnnnnnnnnnnnnnnnnnnnnnnnnnnnnnnnnnnnnnnnnnnnnnnnnnnnnnnnnnnnnnnnnnnnnnnnnnnnnnnnnnnnnnnnnnnnnnnnnnnnnnnnnnnnnnnnnnnnnnnnnnnnnnnnnnnnnnnnnnnnnnnnnnnnnnnnnnnnnnnnnnnnnnnnnnnnnnnnnnnnnnnnnnnnnnnnnnnnnnnnnnnnnnnnnnnnnnnnnnnnnnnnnnnnnnnnnnnnnnnnnnnnnnnnnnnnnnnnnnnnnnnnnnnnnnnnnnnnnnnnnnnnnnnnnnnnnnnnnnnnnnnnnnnnnnnnnnnnnnnnnnnnnnnnnnnnnnnnnnnnnnnnnnnnnnnnnnnnnnnnnnnnnnnnnnnnnnnnnnnnnnnnnnnnnnnnnnnnnnnnnnnnnnnnnnnnnnnnnnnnnnnnnnnnnnnnnnnnnnnnnnnnnnnnnnnnnnnnnnnnnnnnnnnnnnnnnnnnnnnnnnnnnnnnnnnnnnnnnnnnnnnnnnnnnnnnnnnnnnnnnnnnnnnnnnnnnnnnnnnnnnnnnnnnnnnnnnnnnnnnnnnnnnnnnnnnnnnnnnnnnnnnnnnnnnnnnnnnnnnnnnnnnnnnnnnnnnnnnnnnnnnnnnnnnnnnnnnnnnnnnnnnnnnnnnnnnnnnnnnnnnnnnnnnnnnnnnnnnnnnnnnnnnnnnnnnnnnnnnnnnnnnnnnnnnnnnnnnnnnnnnnnnnnnnnnnnnnnnnnnnnnnnnnnnnnnnnnnnnnnnnnnnnnnnnnnnnnnnnnnnnnnnnnnnnnnnnnnnnnnnnnnnnnnnnnnnnnnnnnnnnnnnnnnnnnnnnnnnnnnnnnnnnnnnnnnnnnnnnnnnnnnnnnnnnnnnnnnnnnnnnnnnnnnnnnnnnnnnnnnnnnnnnnnnnnnnnnnnnnnnnnnnnnnnnnnnnnnnnnnnnnnnnnnnnnnnnnnnnnnnnnnnnnnnnnnnnnnnnnnnnnnnnnnnnnnnnnnnnnnnnnnnnnnnnnnnnnnnnnnnnnnnnnnnnnnnnnnnnnnnnnnnnnnnnnnnnnnnnnnnnnnnnnnnnnnnnnnnnnnnnnnnnnnnnnnnnnnnnnnnnnnnnnnnnnnnnnnnnnnnnnnnnnnnnnnnnnnnnnnnnnnnnnnnnnnnnnnnnnnnnnnnnnnnnnnnnnnnnnnnnnnnnnnnnnnnnnnnnnnnnnnnnnnnnnnnnnnnnnnnnnnnnnnnnnnnnnnnnnnnnnnnnnnnnnnnnnnnnnnnnnnnnnnnnnnnnnnnnnnnnnnnnnnnnnnnnnnnnnnnnnnnnnnnnnnnnnnnnnnnnnnnnnnnnnnnnnnnnnnnnnnnnnnnnnnnnnnnnnnnnnnnnnnnnnnnnnnnnnnnnnnnnnnnnnnnnnnnnnnnnnnnnnnnnnnnnnnnnnnnnnnnnnnnnnnnnnnnnnnnnnnnnnnnnnnnnnnnnnnnnnnnnnnnnnnnnnnnnnnnnnnnnnnnnnnnnnnnnnnnnnnnnnnnnnnnnnnnnnnnnnnnnnnnnnnnnnnnnnnnnnnnnnnnnnnnnnnnnnnnnnnnnnnnnnnnnnnnnnnnnnnnnnnnnnnnnnnnnnnnnnnnnnnnnnnnnnnnnnnnnnnnnnnnnnnnnnnnnnnnnnnnnnnnnnnnnnnnnnnnnnnnnnnnnnnnnnnnnnnnnnnnnnnnnnnnnnnnnnnnnnnnnnnnnnnnnnnnnnnnnnnnnnnnnnnnnnnnnnnnnnnnnnnnnnnnnnnnnnnnnnnnnnnnnnnnnnnnnnnnnnnnnnnnnnnnnnnnnnnnnnnnnnnnnnnnnnnnnnnnnnnnnnnnnnnnnnnnnnnnnnnnnnnnnnnnnnnnnnnnnnnnnnnnnnnnnnnnnnnnnnnnnnnnnnnnnnnnnnnnnnnnnnnnnnnnnnnnnnnnnnnnnnnnnnnnnnnnnnnnnnnnnnnnnnnnnnnnnnnnnnnnnnnnnnnnnnnnnnnnnnnnnnnnnnnnnnnnnnnnnnnnnnnnnnnnnnnnnnnnnnnnnnnnnnnnnnnnnnnnnnnnnnnnnnnnnnnnnnnnnnnnnnnnnnnnnnnnnnnnnnnnnnnnnnnnnnnnnnnnnnnnnnnnnnnnnnnnnnnnnnnnnnnnnnnnnnnnnnnnnnnnnnnnnnnnnnnnnnnnnnnnnnnnnnnnnnnnnnnnnnnnnnnnnnnnnnnnnnnnnnnnnnnnnnnnnnnnnnnnnnnnnnnnnnnnnnnnnnnnnnnnnnnnnnnnnnnnnnnnnnnnnnnnnnnnnnnnnnnnnnnnnnnnnnnnnnnnnnnnnnnnnnnnnnnnnnnnnnnnnnnnnnnnnnnnnnnnnnnnnnnnnnnnnnnnnnnnnnnnnnnnnnnnnnnnnnnnnnnnnnnnnnnnnnnnnnnnnnnnnnnnnnnnnnnnnnnnnnnnnnnnnnnnnnnnnnnnnnnnnnnnnnnnnnnnnnnnnnnnnnnnnnnnnnnnnnnnnnnnnnnnnnnnnnnnnnnnnnnnnnnnnnnnnnnnnnnnnnnnnnnnnnnnnnnnnnnnnnnnnnnnnnnnnnnnnnnnnnnnnnnnnnnnnnnnnnnnnnnnnnnnnnnnnnnnnnnnnnnnnnnnnnnnnnnnnnnnnnnnnnnnnnnnnnnnnnnnnnnnnnnnnnnnnnnnnnnnnnnnnnnnnnnnnnnnnnnnnnnnnnnnnnnnnnnnnnnnnnnnnnnnnnnnnnnnnnnnnnnnnnnnnnnnnnnnnnnnnnnnnnnnnnnnnnnnnnnnnnnnnnnnnnnnnnnnnnnnnnnnnnnnnnnnnnnnnnnnnnnnnnnnnnnnnnnnnnnnnnnnnnnnnnnnnnnnnnnnnnnnnnnnnnnnnnnnnnnnnnnnnnnnnnnnnnnnnnnnnnnnnnnnnnnnnnnnnnnnnnnnnnnnnnnnnnnnnnnnnnnnnnnnnnnnnnnnnnnnnnnnnnnnnnnnnnnnnnnnnnnnnnnnnnnnnnnnnnnnnnnnnnnnnnnnnnnnnnnnnnnnnnnnnnnnnnnnnnnnnnnnnnnnnnnnnnnnnnnnnnnnnnnnnnnnnnnnnnnnnnnnnnnnnnnnnnnnnnnnnnnnnnnnnnnnnnnnnnnnnnnnnnnnnnnnnnnnnnnnnnnnnnnnnnnnnnnnnnnnnnnnnnnnnnnnnnnnnnnnnnnnnnnnnnnnnnnnnnnnnnnnnnnnnnnnnnnnnnnnnnnnnnnnnnnnnnnnnnnnnnnnnnnnnnnnnnnnnnnnnnnnnnnnnnnnnnnnnnnnnnnnnnnnnnnnnnnnnnnnnnnnnnnnnnnnnnnnnnnnnnnnnnnnnnnnnnnnnnnnnnnnnnnnnnnnnnnnnnnnnnnnnnnnnnnnnnnnnnnnnnnnnnnnnnnnnnnnnnnnnnnnnnnnnnnnnnnnnnnnnnnnnnnnnnnnnnnnnnnnnnnnnnnnnnnnnnnnnnnnnnnnnnnnnnnnnnnnnnnnnnnnnnnnnnnnnnnnnnnnnnnnnnnnnnnnnnnnnnnnnnnnnnnnnnnnnnnnnnnnnnnnnnnnnnnnnnnnnnnnnnnnnnnnnnnnnnnnnnnnnnnnnnnnnnnnnnnnnnnnnnnnnnnnnnnnnnnnnnnnnnnnnnnnnnnnnnnnnnnnnnnnnnnnnnnnnnnnnnnnnnnnnnnnnnnnnnnnnnnnnnnnnnnnnnnnnnnnnnnnnnnnnnnnnnnnnnnnnnnnnnnnnnnnnnnnnnnnnnnnnnnnnnnnnnnnnnnnnnnnnnnnnnnnnnnnnnnnnnnnnnnnnnnnnnnnnnnnnnnnnnnnnnnnnnnnnnnnnnnnnnnnnnnnnnnnnnnnnnnnnnnnnnnnnnnnnnnnnnnnnnnnnnnnnnnnnnnnnnnnnnnnnnnnnnnnnnnnnnnnnnnnnnnnnnnnnnnnnnnnnnnnnnnnnnnnnnnnnnnnnnnnnnnnnnnnnnnnnnnnnnnnnnnnnnnnnnnnnnnnnnnnnnnnnnnnnnnnnnnnnnnnnnnnnnnnnnnnnnnnnnnnnnnnnnnnnnnnnnnnnnnnnnnnnnnnnnnnnnnnnnnnnnnnnnnnnnnnnnnnnnnnnnnnnnnnnnnnnnnnnnnnnnnnnnnnnnnnnnnnnnnnnnnnnnnnnnnnnnnnnnnnnnnnnnnnnnnnnnnnnnnnnnnnnnnnnnnnnnnnnnnnnnnnnnnnnnnnnnnnnnnnnnnnnnnnnnnnnnnnnnnnnnnnnnnnnnnnnnnnnnnnnnnnnnnnnnnnnnnnnnnnnnnnnnnnnnnnnnnnnnnnnnnnnnnnnnnnnnnnnnnnnnnnnnnnnnnnnnnnnnnnnnnnnnnnnnnnnnnnnnnnnnnnnnnnnnnnnnnnnnnnnnnnnnnnnnnnnnnnnnnnnnnnnnnnnnnnnnnnnnnnnnnnnnnnnnnnnnnnnnnnnnnnnnnnnnnnnnnnnnnnnnnnnnnnnnnnnnnnnnnnnnnnnnnnnnnnnnnnnnnnnnnnnnnnnnnnnnnnnnnnnnnnnnnnnnnnnnnnnnnnnnnnnnnnnnnnnnnnnnnnnnnnnnnnnnnnnnnnnnnnnnnnnnnnnnnnnnnnnnnnnnnnnnnnnnnnnnnnnnnnnnnnnnnnnnnnnnnnnnnnnnnnnnnnnnnnnnnnnnnnnnnnnnnnnnnnnnnnnnnnnnnnnnnnnnnnnnnnnnnnnnnnnnnnnnnnnnnnnnnnnnnnnnnnnnnnnnnnnnnnnnnnnnnnnnnnnnnnnnnnnnnnnnnnnnnnnnnnnnnnnnnnnnnnnnnnnnnnnnnnnnnnnnnnnnnnnnnnnnnnnnnnnnnnnnnnnnnnnnnnnnnnnnnnnnnnnnnnnnnnnnnnnnnnnnnnnnnnnnnnnnnnnnnnnnnnnnnnnnnnnnnnnnnnnnnnnnnnnnnnnnnnnnnnnnnnnnnnnnnnnnnnnnnnnnnnnnnnnnnnnnnnnnnnnnnnnnnnnnnnnnnnnnnnnnnnnnnnnnnnnnnnnnnnnnnnnnnnnnnnnnnnnnnnnnnnnnnnnnnnnnnnnnnnnnnnnnnnnnnnnnnnnnnnnnnnnnnnnnnnnnnnnnnnnnnnnnnnnnnnnnnnnnnnnnnnnnnnnnnnnnnnnnnnnnnnnnnnnnnnnnnnnnnnnnnnnnnnnnnnnnnnnnnnnnnnnnnnnnnnnnnnnnnnnnnnnnnnnnnnnnnnnnnnnnnnnnnnnnnnnnnnnnnnnnnnnnnnnnnnnnnnnnnnnnnnnnnnnnnnnnnnnnnnnnnnnnnnnnnnnnnnnnnnnnnnnnnnnnnnnnnnnnnnnnnnnnnnnnnnnnnnnnnnnnnnnnnnnnnnnnnnnnnnnnnnnnnnnnnnnnnnnnnnnnnnnnnnnnnnnnnnnnnnnnnnnnnnnnnnnnnnnnnnnnnnnnnnnnnnnnnnnnnnnnnnnnnnnnnnnnnnnnnnnnnnnnnnnnnnnnnnnnnnnnnnnnnnnnnnnnnnnnnnnnnnnnnnnnnnnnnnnnnnnnnnnnnnnnnnnnnnnnnnnnnnnnnnnnnnnnnnnnnnnnnnnnnnnnnnnnnnnnnnnnnnnnnnnnnnnnnnnnnnnnnnnnnnnnnnnnnnnnnnnnnnnnnnnnnnnnnnnnnnnnnnnnnnnnnnnnnnnnnnnnnnnnnnnnnnnnnnnnnnnnnnnnnnnnnnnnnnnnnnnnnnnnnnnnnnnnnnnnnnnnnnnnnnnnnnnnnnnnnnnnnnnnnnnnnnnnnnnnnnnnnnnnnnnnnnnnnnnnnnnnnnnnnnnnnnnnnnnnnnnnnnnnnnnnnnnnnnnnnnnnnnnnnnnnnnnnnnnnnnnnnnnnnnnnnnnnnnnnnnnnnnnnnnnnnnnnnnnnnnnnnnnnnnnnnnnnnnnnnnnnnnnnnnnnnnnnnnnnnnnnnnnnnnnnnnnnnnnnnnnnnnnnnnnnnnnnnnnnnnnnnnnnnnnnnnnnnnnnnnnnnnnnnnnnnnnnnnnnnnnnnnnnnnnnnnnnnnnnnnnnnnnnnnnnnnnnnnnnnnnnnnnnnnnnnnnnnnnnnnnnnnnnnnnnnnnnnnnnnnnnnnnnnnnnnnnnnnnnnnnnnnnnnnnnnnnnnnnnnnnnnnnnnnnnnnnnnnnnnnnnnnnnnnnnnnnnnnnnnnnnnnnnnnnnnnnnnnnnnnnnnnnnnnnnnnnnnnnnnnnnnnnnnnnnnnnnnnnnnnnnnnnnnnnnnnnnnnnnnnnnnnnnnnnnnnnnnnnnnnnnnnnnnnnnnnnnnnnnnnnnnnnnnnnnnnnnnnnnnnnnnnnnnnnnnnnnnnnnnnnnnnnnnnnnnnnnnnnnnnnnnnnnnnnnnnnnnnnnnnnnnnnnnnnnnnnnnnnnnnnnnnnnnnnnnnnnnnnnnnnnnnnnnnnnnnnnnnnnnnnnnnnnnnnnnnnnnnnnnnnnnnnnnnnnnnnnnnnnnnnnnnnnnnnnnnnnnnnnnnnnnnnnnnnnnnnnnnnnnnnnnnnnnnnnnnnnnnnnnnnnnnnnnnnnnnnnnnnnnnnnnnnnnnnnnnnnnnnnnnnnnnnnnnnnnnnnnnnnnnnnnnnnnnnnnnnnnnnnnnnnnnnnnnnnnnnnnnnnnnnnnnnnnnnnnnnnnnnnnnnnnnnnnnnnnnnnnnnnnnnnnnnnnnnnnnnnnnnnnnnnnnnnnnnnnnnnnnnnnnnnnnnnnnnnnnnnnnnnnnnnnnnnnnnnnnnnnnnnnnnnnnnnnnnnnnnnnnnnnnnnnnnnnnnnnnnnnnnnnnnnnnnnnnnnnnnnnnnnnnnnnnnnnnnnnnnnnnnnnnnnnnnnnnnnnnnnnnnnnnnnnnnnnnnnnnnnnnnnnnnnnnnnnnnnnnnnnnnnnnnnnnnnnnnnnnnnnnnnnnnnnnnnnnnnnnnnnnnnnnnnnnnnnnnnnnnnnnnnnnnnnnnnnnnnnnnnnnnnnnnnnnnnnnnnnnnnnnnnnnnnnnnnnnnnnnnnnnnnnnnnnnnnnnnnnnnnnnnnnnnnnnnnnnnnnnnnnnnnnnnnnnnnnnnnnnnnnnnnnnnnnnnnnnnnnnnnnnnnnnnnnnnnnnnnnnnnnnnnnnnnnnnnnnnnnnnnnnnnnnnnnnnnnnnnnnnnnnnnnnnnnnnnnnnnnnnnnnnnnnnnnnnnnnnnnnnnnnnnnnnnnnnnnnnnnnnnnnnnnnnnnnnnnnnnnnnnnnnnnnnnnnnnnnnnnnnnnnnnnnnnnnnnnnnnnnnnnnnnnnnnnnnnnnnnnnnnnnnnnnnnnnnnnnnnnnnnnnnnnnnnnnnnnnnnnnnnnnnnnnnnnnnnnnnnnnnnnnnnnnnnnnnnnnnnnnnnnnnnnnnnnnnnnnnnnnnnnnnnnnnnnnnnnnnnnnnnnnnnnnnnnnnnnnnnnnnnnnnnnnnnnnnnnnnnnnnnnnnnnnnnnnnnnnnnnnnnnnnnnnnnnnnnnnnnnnnnnnnnnnnnnnnnnnnnnnnnnnnnnnnnnnnnnnnnnnnnnnnnnnnnnnnnnnnnnnnnnnnnnnnnnnnnnnnnnnnnnnnnnnnnnnnnnnnnnnnnnnnnnnnnnnnnnnnnnnnnnnnnnnnnnnnnnnnnnnnnnnnnnnnnnnnnnnnnnnnnnnnnnnnnnnnnnnnnnnnnnnnnnnnnnnnnnnnnnnnnnnnnnnnnnnnnnnnnnnnnnnnnnnnnnnnnnnnnnnnnnnnnnnnnnnnnnnnnnnnnnnnnnnnnnnnnnnnnnnnnnnnnnnnnnnnnnnnnnnnnnnnnnnnnnnnnnnnnnnnnnnnnnnnnnnnnnnnnnnnnnnnnnnnnnnnnnnnnnnnnnnnnnnnnnnnnnnnnnnnnnnnnnnnnnnnnnnnnnnnnnnnnnnnnnnnnnnnnnnnnnnnnnnnnnnnnnnnnnnnnnnnnnnnnnnnnnnnnnnnnnnnnnnnnnnnnnnnnnnnnnnnnnnnnnnnnnnnnnnnnnnnnnnnnnnnnnnnnnnnnnnnnnnnnnnnnnnnnnnnnnnnnnnnnnnnnnnnnnnnnnnnnnnnnnnnnnnnnnnnnnnnnnnnnnnnnnnnnnnnnnnnnnnnnnnnnnnnnnnnnnnnnnnnnnnnnnnnnnnnnnnnnnnnnnnnnnnnnnnnnnnnnnnnnnnnnnnnnnnnnnnnnnnnnnnnnnnnnnnnnnnnnnnnnnnnnnnnnnnnnnnnnnnnnnnnnnnnnnnnnnnnnnnnnnnnnnnnnnnnnnnnnnnnnnnnnnnnnnnnnnnnnnnnnnnnnnnnnnnnnnnnnnnnnnnnnnnnnnnnnnnnnnnnnnnnnnnnnnnnnnnnnnnnnnnnnnnnnnnnnnnnnnnnnnnnnnnnnnnnnnnnnnnnnnnnnnnnnnnnnnnnnnnnnnnnnnnnnnnnnnnnnnnnnnnnnnnnnnnnnnnnnnnnnnnnnnnnnnnnnnnnnnnnnnnnnnnnnnnnnnnnnnnnnnnnnnnnnnnnnnnnnnnnnnnnnnnnnnnnnnnnnnnnnnnnnnnnnnnnnnnnnnnnnnnnnnnnnnnnnnnnnnnnnnnnnnnnnnnnnnnnnnnnnnnnnnnnnnnnnnnnnnnnnnnnnnnnnnnnnnnnnnnnnnnnnnnnnnnnnnnnnnnnnnnnnnnnnnnnnnnnnnnnnnnnnnnnnnnnnnnnnnnnnnnnnnnnnnnnnnnnnnnnnnnnnnnnnnnnnnnnnnnnnnnnnnnnnnnnnnnnnnnnnnnnnnnnnnnnnnnnnnnnnnnnnnnnnnnnnnnnnnnnnnnnnnnnnnnnnnnnnnnnnnnnnnnnnnnnnnnnnnnnnnnnnnnnnnnnnnnnnnnnnnnnnnnnnnnnnnnnnnnnnnnnnnnnnnnnnnnnnnnnnnnnnnnnnnnnnnnnnnnnnnnnnnnnnnnnnnnnnnnnnnnnnnnnnnnnnnnnnnnnnnnnnnnnnnnnnnnnnnnnnnnnnnnnnnnnnnnnnnnnnnnnnnnnnnnnnnnnnnnnnnnnnnnnnnnnnnnnnnnnnnnnnnnnnnnnnnnnnnnnnnnnnnnnnnnnnnnnnnnnnnnnnnnnnnnnnnnnnnnnnnnnnnnnnnnnnnnnnnnnnnnnnnnnnnnnnnnnnnnnnnnnnnnnnnnnnnnnnnnnnnnnnnnnnnnnnnnnnnnnnnnnnnnnnnnnnnnnnnnnnnnnnnnnnnnnnnnnnnnnnnnnnnnnnnnnnnnnnnnnnnnnnnnnnnnnnnnnnnnnnnnnnnnnnnnnnnnnnnnnnnnnnnnnnnnnnnnnnnnnnnnnnnnnnnnnnnnnnnnnnnnnnnnnnnnnnnnnnnnnnnnnnnnnnnnnnnnnnnnnnnnnnnnnnnnnnnnnnnnnnnnnnnnnnnnnnnnnnnnnnnnnnnnnnnnnnnnnnnnnnnnnnnnnnnnnnnnnnnnnnnnnnnnnnnnnnnnnnnnnnnnnnnnnnnnnnnnnnnnnnnnnnnnnnnnnnnnnnnnnnnnnnnnnnnnnnnnnnnnnnnnnnnnnnnnnnnnnnnnnnnnnnnnnnnnnnnnnnnnnnnnnnnnnnnnnnnnnnnnnnnnnnnnnnnnnnnnnnnnnnnnnnnnnnnnnnnnnnnnnnnnnnnnnnnnnnnnnnnnnnnnnnnnnnnnnnnnnnnnnnnnnnnnnnnnnnnnnnnnnnnnnnnnnnnnnnnnnnnnnnnnnnnnnnnnnnnnnnnnnnnnnnnnnnnnnnnnnnnnnnnnnnnnnnnnnnnnnnnnnnnnnnnnnnnnnnnnnnnnnnnnnnnnnnnnnnnnnnnnnnnnnnnnnnnnnnnnnnnnnnnnnnnnnnnnnnnnnnnnnnnnnnnnnnnnnnnnnnnnnnnnnnnnnnnnnnnnnnnnnnnnnnnnnnnnnnnnnnnnnnnnnnnnnnnnnnnnnnnnnnnnnnnnnnnnnnnnnnnnnnnnnnnnnnnnnnnnnnnnnnnnnnnnnnnnnnnnnnnnnnnnnnnnnnnnnnnnnnnnnnnnnnnnnnnnnnnnnnnnnnnnnnnnnnnnnnnnnnnnnnnnnnnnnnnnnnnnnnnnnnnnnnnnnnnnnnnnnnnnnnnnnnnnnnnnnnnnnnnnnnnnnnnnnnnnnnnnnnnnnnnnnnnnnnnnnnnnnnnnnnnnnnnnnnnnnnnnnnnnnnnnnnnnnnnnnnnnnnnnnnnnnnnnnnnnnnnnnnnnnnnnnnnnnnnnnnnnnnnnnnnnnnnnnnnnnnnnnnnnnnnnnnnnnnnnnnnnnnnnnnnnnnnnnnnnnnnnnnnnnnnnnnnnnnnnnnnnnnnnnnnnnnnnnnnnnnnnnnnnnnnnnnnnnnnnnnnnnnnnnnnnnnnnnnnnnnnnnnnnnnnnnnnnnnnnnnnnnnnnnnnnnnnnnnnnnnnnnnnnnnnnnnnnnnnnnnnnnnnnnnnnnnnnnnnnnnnnnnnnnnnnnnnnnnnnnnnnnnnnnnnnnnnnnnnnnnnnnnnnnnnnnnnnnnnnnnnnnnnnnnnnnnnnnnnnnnnnnnnnnnnnnnnnnnnnnnnnnnnnnnnnnnnnnnnnnnnnnnnnnnnnnnnnnnnnnnnnnnnnnnnnnnnnnnnnnnnnnnnnnnnnnnnnnnnnnnnnnnnnnnnnnnnnnnnnnnnnnnnnnnnnnnnnnnnnnnnnnnnnnnnnnnnnnnnnnnnnnnnnnnnnnnnnnnnnnnnnnnnnnnnnnnnnnnnnnnnnnnnnnnnnnnnnnnnnnnnnnnnnnnnnnnnnnnnnnnnnnnnnnnnnnnnnnnnnnnnnnnnnnnnnnnnnnnnnnnnnnnnnnnnnnnnnnnnnnnnnnnnnnnnnnnnnnnnnnnnnnnnnnnnnnnnnnnnnnnnnnnnnnnnnnnnnnnnnnnnnnnnnnnnnnnnnnnnnnnnnnnnnnnnnnnnnnnnnnnnnnnnnnnnnnnnnnnnnnnnnnnnnnnnnnnnnnnnnnnnnnnnnnnnnnnnnnnnnnnnnnnnnnnnnnnnnnnnnnnnnnnnnnnnnnnnnnnnnnnnnnnnnnnnnnnnnnnnnnnnnnnnnnnnnnnnnnnnnnnnnnnnnnnnnnnnnnnnnnnnnnnnnnnnnnnnnnnnnnnnnnnnnnnnnnnnnnnnnnnnnnnnnnnnnnnnnnnnnnnnnnnnnnnnnnnnnnnnnnnnnnnnnnnnnnnnnnnnnnnnnnnnnnnnnnnnnnnnnnnnnnnnnnnnnnnnnnnnnnnnnnnnnnnnnnnnnnnnnnnnnnnnnnnnnnnnnnnnnnnnnnnnnnnnnnnnnnnnnnnnnnnnnnnnnnnnnnnnnnnnnnnnnnnnnnnnnnnnnnnnnnnnnnnnnnnnnnnnnnnnnnnnnnnnnnnnnnnnnnnnnnnnnnnnnnnnnnnnnnnnnnnnnnnnnnnnnnnnnnnnnnnnnnnnnnnnnnnnnnnnnnnnnnnnnnnnnnnnnnnnnnnnnnnnnnnnnnnnnnnnnnnnnnnnnnnnnnnnnnnnnnnnnnnnnnnnnnnnnnnnnnnnnnnnnnnnnnnnnnnnnnnnnnnnnnnnnnnnnnnnnnnnnnnnnnnnnnnnnnnnnnnnnnnnnnnnnnnnnnnnnnnnnnnnnnnnnnnnnnnnnnnnnnnnnnnnnnnnnnnnnnnnnnnnnnnnnnnnnnnnnnnnnnnnnnnnnnnnnnnnnnnnnnnnnnnnnnnnnnnnnnnnnnnnnnnnnnnnnnnnnnnnnnnnnnnnnnnnnnnnnnnnnnnnnnnnnnnnnnnnnnnnnnnnnnnnnnnnnnnnnnnnnnnnnnnnnnnnnnnnnnnnnnnnnnnnnnnnnnnnnnnnnnnnnnnnnnnnnnnnnnnnnnnnnnnnnnnnnnnnnnnnnnnnnnnnnnnnnnnnnnnnnnnnnnnnnnnnnnnnnnnnnnnnnnnnnnnnnnnnnnnnnnnnnnnnnnnnnnnnnnnnnnnnnnnnnnnnnnnnnnnnnnnnnnnnnnnnnnnnnnnnnnnnnnnnnnnnnnnnnnnnnnnnnnnnnnnnnnnnnnnnnnnnnnnnnnnnnnnnnnnnnnnnnnnnnnnnnnnnnnnnnnnnnnnnnnnnnnnnnnnnnnnnnnnnnnnnnnnnnnnnnnnnnnnnnnnnnnnnnnnnnnnnnnnnnnnnnnnnnnnnnnnnnnnnnnnnnnnnnnnnnnnnnnnnnnnnnnnnnnnnnnnnnnnnnnnnnnnnnnnnnnnnnnnnnnnnnnnnnnnnnnnnnnnnnnnnnnnnnnnnnnnnnnnnnnnnnnnnnnnnnnnnnnnnnnnnnnnnnnnnnnnnnnnnnnnnnnnnnnnnnnnnnnnnnnnnnnnnnnnnnnnnnnnnnnnnnnnnnnnnnnnnnnnnnnnnnnnnnnnnnnnnnnnnnnnnnnnnnnnnnnnnnnnnnnnnnnnnnnnnnnnnnnnnnnnnnnnnnnnnnnnnnnnnnnnnnnnnnnnnnnnnnnnnnnnnnnnnnnnnnnnnnnnnnnnnnnnnnnnnnnnnnnnnnnnnnnnnnnnnnnnnnnnnnnnnnnnnnnnnnnnnnnnnnnnnnnnnnnnnnnnnnnnnnnnnnnnnnnnnnnnnnnnnnnnnnnnnnnnnnnnnnnnnnnnnnnnnnnnnnnnnnnnnnnnnnnnnnnnnnnnnnnnnnnnnnnnnnnnnnnnnnnnnnnnnnnnnnnnnnnnnnnnnnnnnnnnnnnnnnnnnnnnnnnnnnnnnnnnnnnnnnnnnnnnnnnnnnnnnnnnnnnnnnnnnnnnnnnnnnnnnnnnnnnnnnnnnnnnnnnnnnnnnnnnnnnnnnnnnnnnnnnnnnnnnnnnnnnnnnnnnnnnnnnnnnnnnnnnnnnnnnnnnnnnnnnnnnnnnnnnnnnnnnnnnnnnnnnnnnnnnnnnnnnnnnnnnnnnnnnnnnnnnnnnnnnnnnnnnnnnnnnnnnnnnnnnnnnnnnnnnnnnnnnnnnnnnnnnnnnnnnnnnnnnnnnnnnnnnnnnnnnnnnnnnnnnnnnnnnnnnnnnnnnnnnnnnnnnnnnnnnnnnnnnnnnnnnnnnnnnnnnnnnnnnnnnnnnnnnnnnnnnnnnnnnnnnnnnnnnnnnnnnnnnnnnnnnnnnnnnnnnnnnnnnnnnnnnnnnnnnnnnnnnnnnnnnnnnnnnnnnnnnnnnnnnnnnnnnnnnnnnnnnnnnnnnnnnnnnnnnnnnnnnnnnnnnnnnnnnnnnnnnnnnnnnnnnnnnnnnnnnnnnnnnnnnnnnnnnnnnnnnnnnnnnnnnnnnnnnnnnnnnnnnnnnnnnnnnnnnnnnnnnnnnnnnnnnnnnnnnnnnnnnnnnnnnnnnnnnnnnnnnnnnnnnnnnnnnnnnnnnnnnnnnnnnnnnnnnnnnnnnnnnnnnnnnnnnnnnnnnnnnnnnnnnnnnnnnnnnnnnnnnnnnnnnnnnnnnnnnnnnnnnnnnnnnnnnnnnnnnnnnnnnnnnnnnnnnnnnnnnnnnnnnnnnnnnnnnnnnnnnnnnnnnnnnnnnnnnnnnnnnnnnnnnnnnnnnnnnnnnnnnnnnnnnnnnnnnnnnnnnnnnnnnnnnnnnnnnnnnnnnnnnnnnnnnnnnnnnnnnnnnnnnnnnnnnnnnnnnnnnnnnnnnnnnnnnnnnnnnnnnnnnnnnnnnnnnnnnnnnnnnnnnnnnnnnnnnnnnnnnnnnnnnnnnnnnnnnnnnnnnnnnnnnnnnnnnnnnnnnnnnnnnnnnnnnnnnnnnnnnnnnnnnnnnnnnnnnnnnnnnnnnnnnnnnnnnnnnnnnnnnnnnnnnnnnnnnnnnnnnnnnnnnnnnnnnnnnnnnnnnnnnnnnnnnnnnnnnnnnnnnnnnnnnnnnnnnnnnnnnnnnnnnnnnnnnnnnnnnnnnnnnnnnnnnnnnnnnnnnnnnnnnnnnnnnnnnnnnnnnnnnnnnnnnnnnnnnnnnnnnnnnnnnnnnnnnnnnnnnnnnnnnnnnnnnnnnnnnnnnnnnnnnnnnnnnnnnnnnnnnnnnnnnnnnnnnnnnnnnnnnnnnnnnnnnnnnnnnnnnnnnnnnnnnnnnnnnnnnnnnnnnnnnnnnnnnnnnnnnnnnnnnnnnnnnnnnnnnnnnnnnnnnnnnnnnnnnnnnnnnnnnnnnnnnnnnnnnnnnnnnnnnnnnnnnnnnnnnnnnnnnnnnnnnnnnnnnnnnnnnnnnnnnnnnnnnnnnnnnnnnnnnnnnnnnnnnnnnngtggaaagtagacagtaggccgacaacccgctgggtatacgatcgcccatttgcccttttccgccatcggcgattcactctccgcagcgcattacgcacacacattactttaaccgtacaaatgattcattgcaaggaaaggatttcgtgcggcttacaaccgcttggcttcgttgccgattggtggtatcctgatggcgtcgttagtcacggcaaggcgaaagagtccccatgtggcgggaccatggccccaaatgacaaggggatggcgggatggagacgttcaatctgctcgatgaggcgtggattccggtccttttcgccgatgggacggcgcgtcggcttggtatccgtgatacgctcggccgggcgggcgaaattcgccagatagccgccccgaacccgatggacagggtcgccttgttgcgttttctgctggcgattctgtattggtgccggggcaatccagagggactggcggaaaaggacaaaatcctggccgacgggcggtttccggcggattggtttgggaaactcgacgagcgccgggactgctttaacttgctcggggacggtaagcggttctatcaaaacacggcgtaccagcatcaaacacccgatcacacggtcgactacctgctgcatgaggtgccgagcggcgcaaacaaatggcacttccgtcacgccacggatttcgtggacggactttgccgcgcgtgcgccgcgatcggcctgctccgactgccggcgttcgccacatcggcgggcaagggaatgagtcgggctaccggcaagtcgcccggcatcaattccaagccgccgctttacgttatgcccctcgggccaagcctagcggcgactctgctcctctcgtggcgacaatggggatcggacttgggaaaacccgaatgggaagacccgggccgcatggcgctggatgccggcgaagtgccgctgctacgcggattgacgtgggttccgcgaagcatctggctgggcgaaccggagatgccggaatcgatttgtgcggcatgcgggcgaaaagaagtgctgattcgccgatgcgtttttgatggaaagggcagcatcaaggccgaagggcgtgtctggcacgacccgcacctgatctatgtgaccgcgaaggaaaagacgatggccctgcaaacctcgaatgcccttggttccagcgacggggcagccgggcaatgggcgggccaggttgcagcgatccttcgcggcagaagcgagttgcgggctggagcctgctgcgttgttggattctccacagtccagaatgacaagtaccttgaagccacggaccgcttgctgcgccttggtgcgttgccgggcgtcgaagggtcagccgcgatgctggaactatggcagaaagagggcgcgcgattgagccgccgaatgtacccgaaatcctccgcacgacggcacgtggagattcgcccggcgattgacgccgtacgccccgacgtcgaagctgaagcctttgcacatatcgacaagttatgcagcggcgacgatcgggtttgggccggcggctcgggcgtgtattcgccaatgatggaagccgtcgccaagtgcctgtcacccggctttaccaccgctgccgtcggtcgttgccaggaaatctcgcgaatgtcgccagacaagacccgaaaaccacctgttgaagcgcgcgcaccgaaggcagagaatggcggcacttcatgacggccacggaacaatttatcgagacgctggaaacgcttaagcccggcgaccttgggcaactgcgcacgcacgcgggcttgccacttgacgagtccgtggacggctttgatcttttcgctggcctatggtggccgttgcggaagaaaaaccaaaaagcaccccgccgtgaagtcgcctggctcattgccaagctgtacgcataccgtcgcctgccgcagtcggacgcacccctcgcggtgcagctcggacggctcaaagctgccaccgatgacgccaaccggcggcgtcaggagcgatttgatgagttgctcatgcttcccctgggcctgatcgagccggctttgcaatgggcaattacgctgattgccgacaacggatcgggcttgaattgggtgcgcctgaccgatgatctgtcgatctgggagcgggaagaaacacgatgcgaatgggcaaaacaatacatgcgcgttgaaaactgacttctgccaaggagattccatgttgattgaaattcatgcgatccaaaatcatagcccgtcaaacctgaaccgcgacgatttgggcgcgcccaagacgtgctatttcggcggtgtgatgcgctctcgcatctcgagccaatgtatcaagcgaagcatccgcaccagcgatcagttcaagctgctctgcggcggcgtccgcacgcggcagctggcgaagctgattgccgacaaggtgactggcaaaaccgacgtcaagaagcgggcggcggcaattctcaagaaatgcgggataaatccgaaggacgacgacaagagcgacatgctggtttacacgacgaagggggcgatcgacgggatcgccaaactgctgcaagacaacgacggcgattccgaccagctcgcggccgattgcggcaagctgatttccacactcacccttgtgcccgacatggcactcagtgggcgaatgctcgaaacgggcgtgctgaaggacacgacggttgaggccgcgttgcaggtggcccacgcaatctcgacgcatgaagcccggccggaggtcgattactacgttgcggccgacgatgtccccggcagcgacgcaggcgctggctatgtggacgaggcaatgttctcgtccgcctgtttttacaaatacttctccatccactgggaaacactcaccgcaaatctcaaaggcaacgttgcccttgcggcacatacggtcggcgcgttccttcgcggagcggcgctatcgaatccaaccggaaaacagaacagcttcgcggcccacaatccccccgacggcgtgctggtcgaggtcaagagagacggcggcactccaatcagctacgccaacgcattcgcggcgcccgtgccgagcaaagggccgcgcgacgtggtttcgcagagcgtcgctcagttaggacagtatgttcacgacctggatgctggctacggcaggagtggcacgcgcttctggttctcgccgaacctccggtacaagctgacctattgtgaggatcaaagagaagtgccttgcacagacgcaagcaggcagatgagatctctggacgaactggtcgtggctgtcgtgaaggagatcggatttgattggagccaagtccaggcggtcacgaacaacgcggaggtgtagtcgtgggtggaaacacgctcatgcttcgcctggaaggcccgctgcagtcatggggcgatcaagaatcgaagttcctcatccgcagatcgggcggcgcgccgacaaagtcgggaatcctgggagtgctctgcgcggcgctgggcgtttcgcggactgacgcccggcaggagttggcggagctcaacacgcttggcctgggcgtccgcgtcgatcggcccggcgtgcgctggtgggactaccataccgtcggcgcgcggatgcagatgcgcattgcggagggaccgtgcaagacaaaaccgggcgcgatgctgacgcggcgggaatacctgtgtgacgccagttttctcgtcgcgctgcgcggcgagcgaggcttgattgcgcgcctgcacagcgcgctgctgaacccggtttggccgctctacttggggcgcaaatgctgtcccgcatccgctccggtgctcgggcgaaaggacgagccggctgtgggtgaattctccgacctggaatccgcactgcgatcggtcccctggcgacggcggctgcgcgaggatcaccctccagaagcggtcgattgcctcatggaatggcggcccgcgcggccgggggatgttgccccgcccgacgcggaaatctggtacgacgtggcccggtcgttcgatgtgcccggccatgacgccagatttgttattcgccggcagctagcccttggcaacgacaaggacgtaagaatcgacgccgtgccgctgcaatcgcatacgcctgctcctccgcgcccgcgagcggactacacgaacacagagtaccgcaagcgccggcagcagcgcctcgacgccgaccatcgcctttgcgtcttttgcaaatcgcccgccaataccgtccagcacatcacctaccgccgggccgggggcgatgaggcgcaggaagaccttcgctcgctgtgccggctgtgtcacgatgcggtaacgatgatcgagtacgggctggggatgggtctggaccggatcaacccggaggacccggcctatcgcgagcggatcatccagaagcggcaggagatcatcgccttccggtcccaggaaacgcgccgtcggcggcttgaagcggacgaggtggagtgatgtttctttccacgttgctgatcgacactggaacgaaccccgaccggccgcgcccggggcggctgtggctgcggaatgtctatcgggtccaccagcggctttgcatggcctttccgtcgaaagatcgtcgtgggggtgatgaacagttccttaagccttacgatccggcgcagtttgctcaggggcacgtccatgtcgagcgtgacgatgacgcgggattcctctttcgcgtcgatcctctccccggcggcggggccatgatcgtggtgctgtcggcgatccagccggattggggctatgcctttcacaacgcgcgccaccttctggctgccgagccggcgaagtcgcactttctggaagtggcaatcgagtgcggaaagcgattccgcttccgcctgttggccaatgcggtgaaacgtgcgcgacgccagtcgatgcaccgggacggcaaaccgatccaggagaaatgggctggcaagcgcattggcatcaatggagatgagaaatcgctgcgatactggatcgactgccgagccggggacgcggggtttgccgtcgaggaacttacccttgcgcatccgggctacgcctacgccagcaaaacccacgaggccggcgcgggccggcgactgcggtccgtgcgctatgaaggaatgctgaaaatcaccgacgcggacaaatttcgccaggcattggcgcacggaatagggccggccaaagccttcggctttgggctgttgtccatcgctccggccggatagcggcgggggcgggaaggctctttgacaaatgaataagcagttgagcctgcacgatctgccgaggtttgacgacaagctcacctacttgtacgtcgagcacgcggtggtggatcaggaagagcgagccatcgccgtccaccgggccgacgggatcacgtcggttccggtggcggcgctggcggttcttatcatgggtccgggtacgaagatcacgcacgaggcggtcaagacggccgctgataataactgcctgatcctgtgggccggtgagcacggcgtgcggttctatgcccagggcatgggcggcacgcggcatagccggaacctgattcatcaagcacggcttgtcagccaccccatcctgcgattgcaggtggtcgtgcgcatgtaccaaatgcggtttgacgatctgcccgatccgggtctgacccttcagcagttgcggggcaaagaaggaatccgcgtgcgccaggcgtacgcggatgcggcgcgcgaacacgggatcacctggcagggacggtcatacaagcgacaggactggaacgcggccgacccggtgaatcgcgccctatcggccgccaacgcctgcctgtatgggttggcgcacgcggccattttgtcgggggggtattcgccggcgcttggttttgtccatacgggcaagcagctttcattcgtctacgatgttgcggacttatacaaggcgcgatacatcgtgccgatagcgttcaaactcgcggcacagaacccgatgaatctggagcgcgaggtaagactggcctgccgcgattgtttccgtgaagggaagctggcggcgagcatccttccggatatcgccgccgccctggccgtgcccaaggaactggccgaggccgccgaagcggactacgccgacgatccagcactgccggcggattggtggacgccgacgggaatcggcgccgaaacgcccgttggccaaattctggcaatggcaccggccgcaccgggaacgtgatccagatcgggaggcgccacatggttgttttcattcttcagcgtgttacgccgtcattgcggggcgaactgacccgctggctgcttcagccgcacaccggcctgttcgtgggcaccgtttccgcccgtgtgcggctgcggctgtgggatcggatcggccggtccctcaaaggcggggccgcaataatgatctacccggccccgaccgagcaaggattcgcaattgaaaccagcgggaaaaccaagaaggccgtcgaggacttcgagggcatcatgctggcaaaaacccgcgccatgaagtaatttccagtgtcttccccacgcacgtgggggtgaaccgtacgggcgagacacagatatcgaattggcaatgtcttccccacgcacgtgggggtgaaccgccgtcggggacaccgttcgccgggcagaagatgtcttccccacgcacgtgggggtgaaccgaacgcccaacgcgtgacgatgctggcgaccctgtcttccccacgcacgtgggggtgaaccgaccttcgcctttgccgcgccggggaggataaagtcttccccacgcacgtgggggtgaaccggcaagctccgggccaaggtcgaagacaaggacgtcttccccacgcacgtgggggtgaaccgatgttagccatcgccagtccatctttccgcttgtcttccccacgcacgtgggggtgaaccaggtggcgtcaaagtcccgtcgagcctactggctgtcttccccacgcacgtgggggtgaaccgtacgggcgagacacagacgtagaagtggcaatgtcttccccacgcacgtgggggtgaaccaggaatggggttagtttagggaatggggttagtgtcttccccacgcacgtgggggtgaaccgtgaccgtggatgtcgcggtttgggaggccggcgtcttccccacgcacgtgggggtgaaccgaatttgacaacatgggtgggattgcgttggcagtcttccccacgcacgtgggggtgaaccgcgattcccactggcaatcgtcttgtcgtcgagtcttccccacgcacgtgggggtgaaccacgttcgccgctgcaagtcggcgaaaaggtctttcaacccggccctgaaaggcattcgcaaccgggcggggcgatggtcatgcggcgggggttggtgttgcgaatggctttcagggccgggttgtcgcggggtcgccatggcggaatggctggaagaccgcgcggtggcgagtcgaatcctgcggtcaaaggggcgtattgaatccggcgtcatggcgtctgtgcggccgatccgcgatttggggctttgggaactttcatccaatcttgacaatatcggcggtatcggtacgatgccccatcctttgccgggtctggcgggagagtcgggcggcgagggattttatttggccggccgcagtggcggtcagcgaggaaacgcgatgagcacgtatctggcccacccgggcgaaattacagccaagtggcacgttgtggatgccacggaccaggtgctggggcggatggccgcccgcatcgcgatcatcctgcaggggaagcatcggccgacatatacgcgaaacgtggataccggcgattttgtcatcgtgctcaatgccgagaaggtgaaagtcacgggcaagaagtcggagcagattcaatatgagacgtattcgacgtacgccggcgggcggcggctgtattcgtacaaggcgatgaacagcctgcatccggagaaggtgatcgaactggccgtgcgaaggatgctccccaagagcaaaatgggccgtaatattctgggcaagctgaaagtgtatcgcggcacggagcatccgcacgccgcgcagcagccggtgccgttgaaactggcgtgagagaggaattatccccggcggcggtttgcgccgtgaccgtgcgaatgagattttcatgaccgaaacaccgaccatcgagagcgttgcgagcagcgaaaccccgaccgaggccgtggccgtgcccgcagccgaaccggccgtaaccgtaccggcgggcaagccgtcgtacatctgggggatcgggcgtcgcaagacggcggtggcccgcgtgcggatcgcgatcggcagcgggaagatcgtggtgaacgggcgaacgctcaacgaatatttcactggcgagcgtgaccgcaagtcgatttttggtccgctggaagtgaccaacaccgggggcaagctggacgtcttggcccgatgcacgggcggcggcccgtcggggcagaccggggccatcgtcatgggattgggccgggctctggccaaattcgatccgagcctggaaatacccctgcgccaaagcgggttcctcacgcgcgacagccggatgaaggaacgcaagaaatacggccagcgcggcgcccgccgtcgattccagttctcgaagcgataatcggtgtttttcctttggcaaggctcagaacaggcttttgtacagcctcgtcgggggcttttgcgcgcggtcccggcggcgtattgccggcaattgcctgaaacatatcgtttggaccgccgttctgatcatagggatgccgcttgttctgtggccggttttggcgacaatggcggtggtggatttaccgacttgggccgtacgccaaagggcctgatcggggagacgacgcggtggaaacaggcaatcgttccattttgagttattttcgcgcgggggccg

SEQ ID NO: 1071 - DNA, 104977 bp, Artificial Sequence
  Synthetic Oligonucleotide
  misc_feature (1)..(96242): n is a, c, g, or t
nnnnnnnnnnnnnnnnnnnnnnnnnnnnnnnnnnnnnnnnnnnnnnnnnnnnnnnnnnnnnnnnnnnnnnnnnnnnnnnnnnnnnnnnnnnnnnnnnnnnnnnnnnnnnnnnnnnnnnnnnnnnnnnnnnnnnnnnnnnnnnnnnnnnnnnnnnnnnnnnnnnnnnnnnnnnnnnnnnnnnnnnnnnnnnnnnnnnnnnnnnnnnnnnnnnnnnnnnnnnnnnnnnnnnnnnnnnnnnnnnnnnnnnnnnnnnnnnnnnnnnnnnnnnnnnnnnnnnnnnnnnnnnnnnnnnnnnnnnnnnnnnnnnnnnnnnnnnnnnnnnnnnnnnnnnnnnnnnnnnnnnnnnnnnnnnnnnnnnnnnnnnnnnnnnnnnnnnnnnnnnnnnnnnnnnnnnnnnnnnnnnnnnnnnnnnnnnnnnnnnnnnnnnnnnnnnnnnnnnnnnnnnnnnnnnnnnnnnnnnnnnnnnnnnnnnnnnnnnnnnnnnnnnnnnnnnnnnnnnnnnnnnnnnnnnnnnnnnnnnnnnnnnnnnnnnnnnnnnnnnnnnnnnnnnnnnnnnnnnnnnnnnnnnnnnnnnnnnnnnnnnnnnnnnnnnnnnnnnnnnnnnnnnnnnnnnnnnnnnnnnnnnnnnnnnnnnnnnnnnnnnnnnnnnnnnnnnnnnnnnnnnnnnnnnnnnnnnnnnnnnnnnnnnnnnnnnnnnnnnnnnnnnnnnnnnnnnnnnnnnnnnnnnnnnnnnnnnnnnnnnnnnnnnnnnnnnnnnnnnnnnnnnnnnnnnnnnnnnnnnnnnnnnnnnnnnnnnnnnnnnnnnnnnnnnnnnnnnnnnnnnnnnnnnnnnnnnnnnnnnnnnnnnnnnnnnnnnnnnnnnnnnnnnnnnnnnnnnnnnnnnnnnnnnnnnnnnnnnnnnnnnnnnnnnnnnnnnnnnnnnnnnnnnnnnnnnnnnnnnnnnnnnnnnnnnnnnnnnnnnnnnnnnnnnnnnnnnnnnnnnnnnnnnnnnnnnnnnnnnnnnnnnnnnnnnnnnnnnnnnnnnnnnnnnnnnnnnnnnnnnnnnnnnnnnnnnnnnnnnnnnnnnnnnnnnnnnnnnnnnnnnnnnnnnnnnnnnnnnnnnnnnnnnnnnnnnnnnnnnnnnnnnnnnnnnnnnnnnnnnnnnnnnnnnnnnnnnnnnnnnnnnnnnnnnnnnnnnnnnnnnnnnnnnnnnnnnnnnnnnnnnnnnnnnnnnnnnnnnnnnnnnnnnnnnnnnnnnnnnnnnnnnnnnnnnnnnnnnnnnnnnnnnnnnnnnnnnnnnnnnnnnnnnnnnnnnnnnnnnnnnnnnnnnnnnnnnnnnnnnnnnnnnnnnnnnnnnnnnnnnnnnnnnnnnnnnnnnnnnnnnnnnnnnnnnnnnnnnnnnnnnnnnnnnnnnnnnnnnnnnnnnnnnnnnnnnnnnnnnnnnnnnnnnnnnnnnnnnnnnnnnnnnnnnnnnnnnnnnnnnnnnnnnnnnnnnnnnnnnnnnnnnnnnnnnnnnnnnnnnnnnnnnnnnnnnnnnnnnnnnnnnnnnnnnnnnnnnnnnnnnnnnnnnnnnnnnnnnnnnnnnnnnnnnnnnnnnnnnnnnnnnnnnnnnnnnnnnnnnnnnnnnnnnnnnnnnnnnnnnnnnnnnnnnnnnnnnnnnnnnnnnnnnnnnnnnnnnnnnnnnnnnnnnnnnnnnnnnnnnnnnnnnnnnnnnnnnnnnnnnnnnnnnnnnnnnnnnnnnnnnnnnnnnnnnnnnnnnnnnnnnnnnnnnnnnnnnnnnnnnnnnnnnnnnnnnnnnnnnnnnnnnnnnnnnnnnnnnnnnnnnnnnnnnnnnnnnnnnnnnnnnnnnnnnnnnnnnnnnnnnnnnnnnnnnnnnnnnnnnnnnnnnnnnnnnnnnnnnnnnnnnnnnnnnnnnnnnnnnnnnnnnnnnnnnnnnnnnnnnnnnnnnnnnnnnnnnnnnnnnnnnnnnnnnnnnnnnnnnnnnnnnnnnnnnnnnnnnnnnnnnnnnnnnnnnnnnnnnnnnnnnnnnnnnnnnnnnnnnnnnnnnnnnnnnnnnnnnnnnnnnnnnnnnnnnnnnnnnnnnnnnnnnnnnnnnnnnnnnnnnnnnnnnnnnnnnnnnnnnnnnnnnnnnnnnnnnnnnnnnnnnnnnnnnnnnnnnnnnnnnnnnnnnnnnnnnnnnnnnnnnnnnnnnnnnnnnnnnnnnnnnnnnnnnnnnnnnnnnnnnnnnnnnnnnnnnnnnnnnnnnnnnnnnnnnnnnnnnnnnnnnnnnnnnnnnnnnnnnnnnnnnnnnnnnnnnnnnnnnnnnnnnnnnnnnnnnnnnnnnnnnnnnnnnnnnnnnnnnnnnnnnnnnnnnnnnnnnnnnnnnnnnnnnnnnnnnnnnnnnnnnnnnnnnnnnnnnnnnnnnnnnnnnnnnnnnnnnnnnnnnnnnnnnnnnnnnnnnnnnnnnnnnnnnnnnnnnnnnnnnnnnnnnnnnnnnnnnnnnnnnnnnnnnnnnnnnnnnnnnnnnnnnnnnnnnnnnnnnnnnnnnnnnnnnnnnnnnnnnnnnnnnnnnnnnnnnnnnnnnnnnnnnnnnnnnnnnnnnnnnnnnnnnnnnnnnnnnnnnnnnnnnnnnnnnnnnnnnnnnnnnnnnnnnnnnnnnnnnnnnnnnnnnnnnnnnnnnnnnnnnnnnnnnnnnnnnnnnnnnnnnnnnnnnnnnnnnnnnnnnnnnnnnnnnnnnnnnnnnnnnnnnnnnnnnnnnnnnnnnnnnnnnnnnnnnnnnnnnnnnnnnnnnnnnnnnnnnnnnnnnnnnnnnnnnnnnnnnnnnnnnnnnnnnnnnnnnnnnnnnnnnnnnnnnnnnnnnnnnnnnnnnnnnnnnnnnnnnnnnnnnnnnnnnnnnnnnnnnnnnnnnnnnnnnnnnnnnnnnnnnnnnnnnnnnnnnnnnnnnnnnnnnnnnnnnnnnnnnnnnnnnnnnnnnnnnnnnnnnnnnnnnnnnnnnnnnnnnnnnnnnnnnnnnnnnnnnnnnnnnnnnnnnnnnnnnnnnnnnnnnnnnnnnnnnnnnnnnnnnnnnnnnnnnnnnnnnnnnnnnnnnnnnnnnnnnnnnnnnnnnnnnnnnnnnnnnnnnnnnnnnnnnnnnnnnnnnnnnnnnnnnnnnnnnnnnnnnnnnnnnnnnnnnnnnnnnnnnnnnnnnnnnnnnnnnnnnnnnnnnnnnnnnnnnnnnnnnnnnnnnnnnnnnnnnnnnnnnnnnnnnnnnnnnnnnnnnnnnnnnnnnnnnnnnnnnnnnnnnnnnnnnnnnnnnnnnnnnnnnnnnnnnnnnnnnnnnnnnnnnnnnnnnnnnnnnnnnnnnnnnnnnnnnnnnnnnnnnnnnnnnnnnnnnnnnnnnnnnnnnnnnnnnnnnnnnnnnnnnnnnnnnnnnnnnnnnnnnnnnnnnnnnnnnnnnnnnnnnnnnnnnnnnnnnnnnnnnnnnnnnnnnnnnnnnnnnnnnnnnnnnnnnnnnnnnnnnnnnnnnnnnnnnnnnnnnnnnnnnnnnnnnnnnnnnnnnnnnnnnnnnnnnnnnnnnnnnnnnnnnnnnnnnnnnnnnnnnnnnnnnnnnnnnnnnnnnnnnnnnnnnnnnnnnnnnnnnnnnnnnnnnnnnnnnnnnnnnnnnnnnnnnnnnnnnnnnnnnnnnnnnnnnnnnnnnnnnnnnnnnnnnnnnnnnnnnnnnnnnnnnnnnnnnnnnnnnnnnnnnnnnnnnnnnnnnnnnnnnnnnnnnnnnnnnnnnnnnnnnnnnnnnnnnnnnnnnnnnnnnnnnnnnnnnnnnnnnnnnnnnnnnnnnnnnnnnnnnnnnnnnnnnnnnnnnnnnnnnnnnnnnnnnnnnnnnnnnnnnnnnnnnnnnnnnnnnnnnnnnnnnnnnnnnnnnnnnnnnnnnnnnnnnnnnnnnnnnnnnnnnnnnnnnnnnnnnnnnnnnnnnnnnnnnnnnnnnnnnnnnnnnnnnnnnnnnnnnnnnnnnnnnnnnnnnnnnnnnnnnnnnnnnnnnnnnnnnnnnnnnnnnnnnnnnnnnnnnnnnnnnnnnnnnnnnnnnnnnnnnnnnnnnnnnnnnnnnnnnnnnnnnnnnnnnnnnnnnnnnnnnnnnnnnnnnnnnnnnnnnnnnnnnnnnnnnnnnnnnnnnnnnnnnnnnnnnnnnnnnnnnnnnnnnnnnnnnnnnnnnnnnnnnnnnnnnnnnnnnnnnnnnnnnnnnnnnnnnnnnnnnnnnnnnnnnnnnnnnnnnnnnnnnnnnnnnnnnnnnnnnnnnnnnnnnnnnnnnnnnnnnnnnnnnnnnnnnnnnnnnnnnnnnnnnnnnnnnnnnnnnnnnnnnnnnnnnnnnnnnnnnnnnnnnnnnnnnnnnnnnnnnnnnnnnnnnnnnnnnnnnnnnnnnnnnnnnnnnnnnnnnnnnnnnnnnnnnnnnnnnnnnnnnnnnnnnnnnnnnnnnnnnnnnnnnnnnnnnnnnnnnnnnnnnnnnnnnnnnnnnnnnnnnnnnnnnnnnnnnnnnnnnnnnnnnnnnnnnnnnnnnnnnnnnnnnnnnnnnnnnnnnnnnnnnnnnnnnnnnnnnnnnnnnnnnnnnnnnnnnnnnnnnnnnnnnnnnnnnnnnnnnnnnnnnnnnnnnnnnnnnnnnnnnnnnnnnnnnnnnnnnnnnnnnnnnnnnnnnnnnnnnnnnnnnnnnnnnnnnnnnnnnnnnnnnnnnnnnnnnnnnnnnnnnnnnnnnnnnnnnnnnnnnnnnnnnnnnnnnnnnnnnnnnnnnnnnnnnnnnnnnnnnnnnnnnnnnnnnnnnnnnnnnnnnnnnnnnnnnnnnnnnnnnnnnnnnnnnnnnnnnnnnnnnnnnnnnnnnnnnnnnnnnnnnnnnnnnnnnnnnnnnnnnnnnnnnnnnnnnnnnnnnnnnnnnnnnnnnnnnnnnnnnnnnnnnnnnnnnnnnnnnnnnnnnnnnnnnnnnnnnnnnnnnnnnnnnnnnnnnnnnnnnnnnnnnnnnnnnnnnnnnnnnnnnnnnnnnnnnnnnnnnnnnnnnnnnnnnnnnnnnnnnnnnnnnnnnnnnnnnnnnnnnnnnnnnnnnnnnnnnnnnnnnnnnnnnnnnnnnnnnnnnnnnnnnnnnnnnnnnnnnnnnnnnnnnnnnnnnnnnnnnnnnnnnnnnnnnnnnnnnnnnnnnnnnnnnnnnnnnnnnnnnnnnnnnnnnnnnnnnnnnnnnnnnnnnnnnnnnnnnnnnnnnnnnnnnnnnnnnnnnnnnnnnnnnnnnnnnnnnnnnnnnnnnnnnnnnnnnnnnnnnnnnnnnnnnnnnnnnnnnnnnnnnnnnnnnnnnnnnnnnnnnnnnnnnnnnnnnnnnnnnnnnnnnnnnnnnnnnnnnnnnnnnnnnnnnnnnnnnnnnnnnnnnnnnnnnnnnnnnnnnnnnnnnnnnnnnnnnnnnnnnnnnnnnnnnnnnnnnnnnnnnnnnnnnnnnnnnnnnnnnnnnnnnnnnnnnnnnnnnnnnnnnnnnnnnnnnnnnnnnnnnnnnnnnnnnnnnnnnnnnnnnnnnnnnnnnnnnnnnnnnnnnnnnnnnnnnnnnnnnnnnnnnnnnnnnnnnnnnnnnnnnnnnnnnnnnnnnnnnnnnnnnnnnnnnnnnnnnnnnnnnnnnnnnnnnnnnnnnnnnnnnnnnnnnnnnnnnnnnnnnnnnnnnnnnnnnnnnnnnnnnnnnnnnnnnnnnnnnnnnnnnnnnnnnnnnnnnnnnnnnnnnnnnnnnnnnnnnnnnnnnnnnnnnnnnnnnnnnnnnnnnnnnnnnnnnnnnnnnnnnnnnnnnnnnnnnnnnnnnnnnnnnnnnnnnnnnnnnnnnnnnnnnnnnnnnnnnnnnnnnnnnnnnnnnnnnnnnnnnnnnnnnnnnnnnnnnnnnnnnnnnnnnnnnnnnnnnnnnnnnnnnnnnnnnnnnnnnnnnnnnnnnnnnnnnnnnnnnnnnnnnnnnnnnnnnnnnnnnnnnnnnnnnnnnnnnnnnnnnnnnnnnnnnnnnnnnnnnnnnnnnnnnnnnnnnnnnnnnnnnnnnnnnnnnnnnnnnnnnnnnnnnnnnnnnnnnnnnnnnnnnnnnnnnnnnnnnnnnnnnnnnnnnnnnnnnnnnnnnnnnnnnnnnnnnnnnnnnnnnnnnnnnnnnnnnnnnnnnnnnnnnnnnnnnnnnnnnnnnnnnnnnnnnnnnnnnnnnnnnnnnnnnnnnnnnnnnnnnnnnnnnnnnnnnnnnnnnnnnnnnnnnnnnnnnnnnnnnnnnnnnnnnnnnnnnnnnnnnnnnnnnnnnnnnnnnnnnnnnnnnnnnnnnnnnnnnnnnnnnnnnnnnnnnnnnnnnnnnnnnnnnnnnnnnnnnnnnnnnnnnnnnnnnnnnnnnnnnnnnnnnnnnnnnnnnnnnnnnnnnnnnnnnnnnnnnnnnnnnnnnnnnnnnnnnnnnnnnnnnnnnnnnnnnnnnnnnnnnnnnnnnnnnnnnnnnnnnnnnnnnnnnnnnnnnnnnnnnnnnnnnnnnnnnnnnnnnnnnnnnnnnnnnnnnnnnnnnnnnnnnnnnnnnnnnnnnnnnnnnnnnnnnnnnnnnnnnnnnnnnnnnnnnnnnnnnnnnnnnnnnnnnnnnnnnnnnnnnnnnnnnnnnnnnnnnnnnnnnnnnnnnnnnnnnnnnnnnnnnnnnnnnnnnnnnnnnnnnnnnnnnnnnnnnnnnnnnnnnnnnnnnnnnnnnnnnnnnnnnnnnnnnnnnnnnnnnnnnnnnnnnnnnnnnnnnnnnnnnnnnnnnnnnnnnnnnnnnnnnnnnnnnnnnnnnnnnnnnnnnnnnnnnnnnnnnnnnnnnnnnnnnnnnnnnnnnnnnnnnnnnnnnnnnnnnnnnnnnnnnnnnnnnnnnnnnnnnnnnnnnnnnnnnnnnnnnnnnnnnnnnnnnnnnnnnnnnnnnnnnnnnnnnnnnnnnnnnnnnnnnnnnnnnnnnnnnnnnnnnnnnnnnnnnnnnnnnnnnnnnnnnnnnnnnnnnnnnnnnnnnnnnnnnnnnnnnnnnnnnnnnnnnnnnnnnnnnnnnnnnnnnnnnnnnnnnnnnnnnnnnnnnnnnnnnnnnnnnnnnnnnnnnnnnnnnnnnnnnnnnnnnnnnnnnnnnnnnnnnnnnnnnnnnnnnnnnnnnnnnnnnnnnnnnnnnnnnnnnnnnnnnnnnnnnnnnnnnnnnnnnnnnnnnnnnnnnnnnnnnnnnnnnnnnnnnnnnnnnnnnnnnnnnnnnnnnnnnnnnnnnnnnnnnnnnnnnnnnnnnnnnnnnnnnnnnnnnnnnnnnnnnnnnnnnnnnnnnnnnnnnnnnnnnnnnnnnnnnnnnnnnnnnnnnnnnnnnnnnnnnnnnnnnnnnnnnnnnnnnnnnnnnnnnnnnnnnnnnnnnnnnnnnnnnnnnnnnnnnnnnnnnnnnnnnnnnnnnnnnnnnnnnnnnnnnnnnnnnnnnnnnnnnnnnnnnnnnnnnnnnnnnnnnnnnnnnnnnnnnnnnnnnnnnnnnnnnnnnnnnnnnnnnnnnnnnnnnnnnnnnnnnnnnnnnnnnnnnnnnnnnnnnnnnnnnnnnnnnnnnnnnnnnnnnnnnnnnnnnnnnnnnnnnnnnnnnnnnnnnnnnnnnnnnnnnnnnnnnnnnnnnnnnnnnnnnnnnnnnnnnnnnnnnnnnnnnnnnnnnnnnnnnnnnnnnnnnnnnnnnnnnnnnnnnnnnnnnnnnnnnnnnnnnnnnnnnnnnnnnnnnnnnnnnnnnnnnnnnnnnnnnnnnnnnnnnnnnnnnnnnnnnnnnnnnnnnnnnnnnnnnnnnnnnnnnnnnnnnnnnnnnnnnnnnnnnnnnnnnnnnnnnnnnnnnnnnnnnnnnnnnnnnnnnnnnnnnnnnnnnnnnnnnnnnnnnnnnnnnnnnnnnnnnnnnnnnnnnnnnnnnnnnnnnnnnnnnnnnnnnnnnnnnnnnnnnnnnnnnnnnnnnnnnnnnnnnnnnnnnnnnnnnnnnnnnnnnnnnnnnnnnnnnnnnnnnnnnnnnnnnnnnnnnnnnnnnnnnnnnnnnnnnnnnnnnnnnnnnnnnnnnnnnnnnnnnnnnnnnnnnnnnnnnnnnnnnnnnnnnnnnnnnnnnnnnnnnnnnnnnnnnnnnnnnnnnnnnnnnnnnnnnnnnnnnnnnnnnnnnnnnnnnnnnnnnnnnnnnnnnnnnnnnnnnnnnnnnnnnnnnnnnnnnnnnnnnnnnnnnnnnnnnnnnnnnnnnnnnnnnnnnnnnnnnnnnnnnnnnnnnnnnnnnnnnnnnnnnnnnnnnnnnnnnnnnnnnnnnnnnnnnnnnnnnnnnnnnnnnnnnnnnnnnnnnnnnnnnnnnnnnnnnnnnnnnnnnnnnnnnnnnnnnnnnnnnnnnnnnnnnnnnnnnnnnnnnnnnnnnnnnnnnnnnnnnnnnnnnnnnnnnnnnnnnnnnnnnnnnnnnnnnnnnnnnnnnnnnnnnnnnnnnnnnnnnnnnnnnnnnnnnnnnnnnnnnnnnnnnnnnnnnnnnnnnnnnnnnnnnnnnnnnnnnnnnnnnnnnnnnnnnnnnnnnnnnnnnnnnnnnnnnnnnnnnnnnnnnnnnnnnnnnnnnnnnnnnnnnnnnnnnnnnnnnnnnnnnnnnnnnnnnnnnnnnnnnnnnnnnnnnnnnnnnnnnnnnnnnnnnnnnnnnnnnnnnnnnnnnnnnnnnnnnnnnnnnnnnnnnnnnnnnnnnnnnnnnnnnnnnnnnnnnnnnnnnnnnnnnnnnnnnnnnnnnnnnnnnnnnnnnnnnnnnnnnnnnnnnnnnnnnnnnnnnnnnnnnnnnnnnnnnnnnnnnnnnnnnnnnnnnnnnnnnnnnnnnnnnnnnnnnnnnnnnnnnnnnnnnnnnnnnnnnnnnnnnnnnnnnnnnnnnnnnnnnnnnnnnnnnnnnnnnnnnnnnnnnnnnnnnnnnnnnnnnnnnnnnnnnnnnnnnnnnnnnnnnnnnnnnnnnnnnnnnnnnnnnnnnnnnnnnnnnnnnnnnnnnnnnnnnnnnnnnnnnnnnnnnnnnnnnnnnnnnnnnnnnnnnnnnnnnnnnnnnnnnnnnnnnnnnnnnnnnnnnnnnnnnnnnnnnnnnnnnnnnnnnnnnnnnnnnnnnnnnnnnnnnnnnnnnnnnnnnnnnnnnnnnnnnnnnnnnnnnnnnnnnnnnnnnnnnnnnnnnnnnnnnnnnnnnnnnnnnnnnnnnnnnnnnnnnnnnnnnnnnnnnnnnnnnnnnnnnnnnnnnnnnnnnnnnnnnnnnnnnnnnnnnnnnnnnnnnnnnnnnnnnnnnnnnnnnnnnnnnnnnnnnnnnnnnnnnnnnnnnnnnnnnnnnnnnnnnnnnnnnnnnnnnnnnnnnnnnnnnnnnnnnnnnnnnnnnnnnnnnnnnnnnnnnnnnnnnnnnnnnnnnnnnnnnnnnnnnnnnnnnnnnnnnnnnnnnnnnnnnnnnnnnnnnnnnnnnnnnnnnnnnnnnnnnnnnnnnnnnnnnnnnnnnnnnnnnnnnnnnnnnnnnnnnnnnnnnnnnnnnnnnnnnnnnnnnnnnnnnnnnnnnnnnnnnnnnnnnnnnnnnnnnnnnnnnnnnnnnnnnnnnnnnnnnnnnnnnnnnnnnnnnnnnnnnnnnnnnnnnnnnnnnnnnnnnnnnnnnnnnnnnnnnnnnnnnnnnnnnnnnnnnnnnnnnnnnnnnnnnnnnnnnnnnnnnnnnnnnnnnnnnnnnnnnnnnnnnnnnnnnnnnnnnnnnnnnnnnnnnnnnnnnnnnnnnnnnnnnnnnnnnnnnnnnnnnnnnnnnnnnnnnnnnnnnnnnnnnnnnnnnnnnnnnnnnnnnnnnnnnnnnnnnnnnnnnnnnnnnnnnnnnnnnnnnnnnnnnnnnnnnnnnnnnnnnnnnnnnnnnnnnnnnnnnnnnnnnnnnnnnnnnnnnnnnnnnnnnnnnnnnnnnnnnnnnnnnnnnnnnnnnnnnnnnnnnnnnnnnnnnnnnnnnnnnnnnnnnnnnnnnnnnnnnnnnnnnnnnnnnnnnnnnnnnnnnnnnnnnnnnnnnnnnnnnnnnnnnnnnnnnnnnnnnnnnnnnnnnnnnnnnnnnnnnnnnnnnnnnnnnnnnnnnnnnnnnnnnnnnnnnnnnnnnnnnnnnnnnnnnnnnnnnnnnnnnnnnnnnnnnnnnnnnnnnnnnnnnnnnnnnnnnnnnnnnnnnnnnnnnnnnnnnnnnnnnnnnnnnnnnnnnnnnnnnnnnnnnnnnnnnnnnnnnnnnnnnnnnnnnnnnnnnnnnnnnnnnnnnnnnnnnnnnnnnnnnnnnnnnnnnnnnnnnnnnnnnnnnnnnnnnnnnnnnnnnnnnnnnnnnnnnnnnnnnnnnnnnnnnnnnnnnnnnnnnnnnnnnnnnnnnnnnnnnnnnnnnnnnnnnnnnnnnnnnnnnnnnnnnnnnnnnnnnnnnnnnnnnnnnnnnnnnnnnnnnnnnnnnnnnnnnnnnnnnnnnnnnnnnnnnnnnnnnnnnnnnnnnnnnnnnnnnnnnnnnnnnnnnnnnnnnnnnnnnnnnnnnnnnnnnnnnnnnnnnnnnnnnnnnnnnnnnnnnnnnnnnnnnnnnnnnnnnnnnnnnnnnnnnnnnnnnnnnnnnnnnnnnnnnnnnnnnnnnnnnnnnnnnnnnnnnnnnnnnnnnnnnnnnnnnnnnnnnnnnnnnnnnnnnnnnnnnnnnnnnnnnnnnnnnnnnnnnnnnnnnnnnnnnnnnnnnnnnnnnnnnnnnnnnnnnnnnnnnnnnnnnnnnnnnnnnnnnnnnnnnnnnnnnnnnnnnnnnnnnnnnnnnnnnnnnnnnnnnnnnnnnnnnnnnnnnnnnnnnnnnnnnnnnnnnnnnnnnnnnnnnnnnnnnnnnnnnnnnnnnnnnnnnnnnnnnnnnnnnnnnnnnnnnnnnnnnnnnnnnnnnnnnnnnnnnnnnnnnnnnnnnnnnnnnnnnnnnnnnnnnnnnnnnnnnnnnnnnnnnnnnnnnnnnnnnnnnnnnnnnnnnnnnnnnnnnnnnnnnnnnnnnnnnnnnnnnnnnnnnnnnnnnnnnnnnnnnnnnnnnnnnnnnnnnnnnnnnnnnnnnnnnnnnnnnnnnnnnnnnnnnnnnnnnnnnnnnnnnnnnnnnnnnnnnnnnnnnnnnnnnnnnnnnnnnnnnnnnnnnnnnnnnnnnnnnnnnnnnnnnnnnnnnnnnnnnnnnnnnnnnnnnnnnnnnnnnnnnnnnnnnnnnnnnnnnnnnnnnnnnnnnnnnnnnnnnnnnnnnnnnnnnnnnnnnnnnnnnnnnnnnnnnnnnnnnnnnnnnnnnnnnnnnnnnnnnnnnnnnnnnnnnnnnnnnnnnnnnnnnnnnnnnnnnnnnnnnnnnnnnnnnnnnnnnnnnnnnnnnnnnnnnnnnnnnnnnnnnnnnnnnnnnnnnnnnnnnnnnnnnnnnnnnnnnnnnnnnnnnnnnnnnnnnnnnnnnnnnnnnnnnnnnnnnnnnnnnnnnnnnnnnnnnnnnnnnnnnnnnnnnnnnnnnnnnnnnnnnnnnnnnnnnnnnnnnnnnnnnnnnnnnnnnnnnnnnnnnnnnnnnnnnnnnnnnnnnnnnnnnnnnnnnnnnnnnnnnnnnnnnnnnnnnnnnnnnnnnnnnnnnnnnnnnnnnnnnnnnnnnnnnnnnnnnnnnnnnnnnnnnnnnnnnnnnnnnnnnnnnnnnnnnnnnnnnnnnnnnnnnnnnnnnnnnnnnnnnnnnnnnnnnnnnnnnnnnnnnnnnnnnnnnnnnnnnnnnnnnnnnnnnnnnnnnnnnnnnnnnnnnnnnnnnnnnnnnnnnnnnnnnnnnnnnnnnnnnnnnnnnnnnnnnnnnnnnnnnnnnnnnnnnnnnnnnnnnnnnnnnnnnnnnnnnnnnnnnnnnnnnnnnnnnnnnnnnnnnnnnnnnnnnnnnnnnnnnnnnnnnnnnnnnnnnnnnnnnnnnnnnnnnnnnnnnnnnnnnnnnnnnnnnnnnnnnnnnnnnnnnnnnnnnnnnnnnnnnnnnnnnnnnnnnnnnnnnnnnnnnnnnnnnnnnnnnnnnnnnnnnnnnnnnnnnnnnnnnnnnnnnnnnnnnnnnnnnnnnnnnnnnnnnnnnnnnnnnnnnnnnnnnnnnnnnnnnnnnnnnnnnnnnnnnnnnnnnnnnnnnnnnnnnnnnnnnnnnnnnnnnnnnnnnnnnnnnnnnnnnnnnnnnnnnnnnnnnnnnnnnnnnnnnnnnnnnnnnnnnnnnnnnnnnnnnnnnnnnnnnnnnnnnnnnnnnnnnnnnnnnnnnnnnnnnnnnnnnnnnnnnnnnnnnnnnnnnnnnnnnnnnnnnnnnnnnnnnnnnnnnnnnnnnnnnnnnnnnnnnnnnnnnnnnnnnnnnnnnnnnnnnnnnnnnnnnnnnnnnnnnnnnnnnnnnnnnnnnnnnnnnnnnnnnnnnnnnnnnnnnnnnnnnnnnnnnnnnnnnnnnnnnnnnnnnnnnnnnnnnnnnnnnnnnnnnnnnnnnnnnnnnnnnnnnnnnnnnnnnnnnnnnnnnnnnnnnnnnnnnnnnnnnnnnnnnnnnnnnnnnnnnnnnnnnnnnnnnnnnnnnnnnnnnnnnnnnnnnnnnnnnnnnnnnnnnnnnnnnnnnnnnnnnnnnnnnnnnnnnnnnnnnnnnnnnnnnnnnnnnnnnnnnnnnnnnnnnnnnnnnnnnnnnnnnnnnnnnnnnnnnnnnnnnnnnnnnnnnnnnnnnnnnnnnnnnnnnnnnnnnnnnnnnnnnnnnnnnnnnnnnnnnnnnnnnnnnnnnnnnnnnnnnnnnnnnnnnnnnnnnnnnnnnnnnnnnnnnnnnnnnnnnnnnnnnnnnnnnnnnnnnnnnnnnnnnnnnnnnnnnnnnnnnnnnnnnnnnnnnnnnnnnnnnnnnnnnnnnnnnnnnnnnnnnnnnnnnnnnnnnnnnnnnnnnnnnnnnnnnnnnnnnnnnnnnnnnnnnnnnnnnnnnnnnnnnnnnnnnnnnnnnnnnnnnnnnnnnnnnnnnnnnnnnnnnnnnnnnnnnnnnnnnnnnnnnnnnnnnnnnnnnnnnnnnnnnnnnnnnnnnnnnnnnnnnnnnnnnnnnnnnnnnnnnnnnnnnnnnnnnnnnnnnnnnnnnnnnnnnnnnnnnnnnnnnnnnnnnnnnnnnnnnnnnnnnnnnnnnnnnnnnnnnnnnnnnnnnnnnnnnnnnnnnnnnnnnnnnnnnnnnnnnnnnnnnnnnnnnnnnnnnnnnnnnnnnnnnnnnnnnnnnnnnnnnnnnnnnnnnnnnnnnnnnnnnnnnnnnnnnnnnnnnnnnnnnnnnnnnnnnnnnnnnnnnnnnnnnnnnnnnnnnnnnnnnnnnnnnnnnnnnnnnnnnnnnnnnnnnnnnnnnnnnnnnnnnnnnnnnnnnnnnnnnnnnnnnnnnnnnnnnnnnnnnnnnnnnnnnnnnnnnnnnnnnnnnnnnnnnnnnnnnnnnnnnnnnnnnnnnnnnnnnnnnnnnnnnnnnnnnnnnnnnnnnnnnnnnnnnnnnnnnnnnnnnnnnnnnnnnnnnnnnnnnnnnnnnnnnnnnnnnnnnnnnnnnnnnnnnnnnnnnnnnnnnnnnnnnnnnnnnnnnnnnnnnnnnnnnnnnnnnnnnnnnnnnnnnnnnnnnnnnnnnnnnnnnnnnnnnnnnnnnnnnnnnnnnnnnnnnnnnnnnnnnnnnnnnnnnnnnnnnnnnnnnnnnnnnnnnnnnnnnnnnnnnnnnnnnnnnnnnnnnnnnnnnnnnnnnnnnnnnnnnnnnnnnnnnnnnnnnnnnnnnnnnnnnnnnnnnnnnnnnnnnnnnnnnnnnnnnnnnnnnnnnnnnnnnnnnnnnnnnnnnnnnnnnnnnnnnnnnnnnnnnnnnnnnnnnnnnnnnnnnnnnnnnnnnnnnnnnnnnnnnnnnnnnnnnnnnnnnnnnnnnnnnnnnnnnnnnnnnnnnnnnnnnnnnnnnnnnnnnnnnnnnnnnnnnnnnnnnnnnnnnnnnnnnnnnnnnnnnnnnnnnnnnnnnnnnnnnnnnnnnnnnnnnnnnnnnnnnnnnnnnnnnnnnnnnnnnnnnnnnnnnnnnnnnnnnnnnnnnnnnnnnnnnnnnnnnnnnnnnnnnnnnnnnnnnnnnnnnnnnnnnnnnnnnnnnnnnnnnnnnnnnnnnnnnnnnnnnnnnnnnnnnnnnnnnnnnnnnnnnnnnnnnnnnnnnnnnnnnnnnnnnnnnnnnnnnnnnnnnnnnnnnnnnnnnnnnnnnnnnnnnnnnnnnnnnnnnnnnnnnnnnnnnnnnnnnnnnnnnnnnnnnnnnnnnnnnnnnnnnnnnnnnnnnnnnnnnnnnnnnnnnnnnnnnnnnnnnnnnnnnnnnnnnnnnnnnnnnnnnnnnnnnnnnnnnnnnnnnnnnnnnnnnnnnnnnnnnnnnnnnnnnnnnnnnnnnnnnnnnnnnnnnnnnnnnnnnnnnnnnnnnnnnnnnnnnnnnnnnnnnnnnnnnnnnnnnnnnnnnnnnnnnnnnnnnnnnnnnnnnnnnnnnnnnnnnnnnnnnnnnnnnnnnnnnnnnnnnnnnnnnnnnnnnnnnnnnnnnnnnnnnnnnnnnnnnnnnnnnnnnnnnnnnnnnnnnnnnnnnnnnnnnnnnnnnnnnnnnnnnnnnnnnnnnnnnnnnnnnnnnnnnnnnnnnnnnnnnnnnnnnnnnnnnnnnnnnnnnnnnnnnnnnnnnnnnnnnnnnnnnnnnnnnnnnnnnnnnnnnnnnnnnnnnnnnnnnnnnnnnnnnnnnnnnnnnnnnnnnnnnnnnnnnnnnnnnnnnnnnnnnnnnnnnnnnnnnnnnnnnnnnnnnnnnnnnnnnnnnnnnnnnnnnnnnnnnnnnnnnnnnnnnnnnnnnnnnnnnnnnnnnnnnnnnnnnnnnnnnnnnnnnnnnnnnnnnnnnnnnnnnnnnnnnnnnnnnnnnnnnnnnnnnnnnnnnnnnnnnnnnnnnnnnnnnnnnnnnnnnnnnnnnnnnnnnnnnnnnnnnnnnnnnnnnnnnnnnnnnnnnnnnnnnnnnnnnnnnnnnnnnnnnnnnnnnnnnnnnnnnnnnnnnnnnnnnnnnnnnnnnnnnnnnnnnnnnnnnnnnnnnnnnnnnnnnnnnnnnnnnnnnnnnnnnnnnnnnnnnnnnnnnnnnnnnnnnnnnnnnnnnnnnnnnnnnnnnnnnnnnnnnnnnnnnnnnnnnnnnnnnnnnnnnnnnnnnnnnnnnnnnnnnnnnnnnnnnnnnnnnnnnnnnnnnnnnnnnnnnnnnnnnnnnnnnnnnnnnnnnnnnnnnnnnnnnnnnnnnnnnnnnnnnnnnnnnnnnnnnnnnnnnnnnnnnnnnnnnnnnnnnnnnnnnnnnnnnnnnnnnnnnnnnnnnnnnnnnnnnnnnnnnnnnnnnnnnnnnnnnnnnnnnnnnnnnnnnnnnnnnnnnnnnnnnnnnnnnnnnnnnnnnnnnnnnnnnnnnnnnnnnnnnnnnnnnnnnnnnnnnnnnnnnnnnnnnnnnnnnnnnnnnnnnnnnnnnnnnnnnnnnnnnnnnnnnnnnnnnnnnnnnnnnnnnnnnnnnnnnnnnnnnnnnnnnnnnnnnnnnnnnnnnnnnnnnnnnnnnnnnnnnnnnnnnnnnnnnnnnnnnnnnnnnnnnnnnnnnnnnnnnnnnnnnnnnnnnnnnnnnnnnnnnnnnnnnnnnnnnnnnnnnnnnnnnnnnnnnnnnnnnnnnnnnnnnnnnnnnnnnnnnnnnnnnnnnnnnnnnnnnnnnnnnnnnnnnnnnnnnnnnnnnnnnnnnnnnnnnnnnnnnnnnnnnnnnnnnnnnnnnnnnnnnnnnnnnnnnnnnnnnnnnnnnnnnnnnnnnnnnnnnnnnnnnnnnnnnnnnnnnnnnnnnnnnnnnnnnnnnnnnnnnnnnnnnnnnnnnnnnnnnnnnnnnnnnnnnnnnnnnnnnnnnnnnnnnnnnnnnnnnnnnnnnnnnnnnnnnnnnnnnnnnnnnnnnnnnnnnnnnnnnnnnnnnnnnnnnnnnnnnnnnnnnnnnnnnnnnnnnnnnnnnnnnnnnnnnnnnnnnnnnnnnnnnnnnnnnnnnnnnnnnnnnnnnnnnnnnnnnnnnnnnnnnnnnnnnnnnnnnnnnnnnnnnnnnnnnnnnnnnnnnnnnnnnnnnnnnnnnnnnnnnnnnnnnnnnnnnnnnnnnnnnnnnnnnnnnnnnnnnnnnnnnnnnnnnnnnnnnnnnnnnnnnnnnnnnnnnnnnnnnnnnnnnnnnnnnnnnnnnnnnnnnnnnnnnnnnnnnnnnnnnnnnnnnnnnnnnnnnnnnnnnnnnnnnnnnnnnnnnnnnnnnnnnnnnnnnnnnnnnnnnnnnnnnnnnnnnnnnnnnnnnnnnnnnnnnnnnnnnnnnnnnnnnnnnnnnnnnnnnnnnnnnnnnnnnnnnnnnnnnnnnnnnnnnnnnnnnnnnnnnnnnnnnnnnnnnnnnnnnnnnnnnnnnnnnnnnnnnnnnnnnnnnnnnnnnnnnnnnnnnnnnnnnnnnnnnnnnnnnnnnnnnnnnnnnnnnnnnnnnnnnnnnnnnnnnnnnnnnnnnnnnnnnnnnnnnnnnnnnnnnnnnnnnnnnnnnnnnnnnnnnnnnnnnnnnnnnnnnnnnnnnnnnnnnnnnnnnnnnnnnnnnnnnnnnnnnnnnnnnnnnnnnnnnnnnnnnnnnnnnnnnnnnnnnnnnnnnnnnnnnnnnnnnnnnnnnnnnnnnnnnnnnnnnnnnnnnnnnnnnnnnnnnnnnnnnnnnnnnnnnnnnnnnnnnnnnnnnnnnnnnnnnnnnnnnnnnnnnnnnnnnnnnnnnnnnnnnnnnnnnnnnnnnnnnnnnnnnnnnnnnnnnnnnnnnnnnnnnnnnnnnnnnnnnnnnnnnnnnnnnnnnnnnnnnnnnnnnnnnnnnnnnnnnnnnnnnnnnnnnnnnnnnnnnnnnnnnnnnnnnnnnnnnnnnnnnnnnnnnnnnnnnnnnnnnnnnnnnnnnnnnnnnnnnnnnnnnnnnnnnnnnnnnnnnnnnnnnnnnnnnnnnnnnnnnnnnnnnnnnnnnnnnnnnnnnnnnnnnnnnnnnnnnnnnnnnnnnnnnnnnnnnnnnnnnnnnnnnnnnnnnnnnnnnnnnnnnnnnnnnnnnnnnnnnnnnnnnnnnnnnnnnnnnnnnnnnnnnnnnnnnnnnnnnnnnnnnnnnnnnnnnnnnnnnnnnnnnnnnnnnnnnnnnnnnnnnnnnnnnnnnnnnnnnnnnnnnnnnnnnnnnnnnnnnnnnnnnnnnnnnnnnnnnnnnnnnnnnnnnnnnnnnnnnnnnnnnnnnnnnnnnnnnnnnnnnnnnnnnnnnnnnnnnnnnnnnnnnnnnnnnnnnnnnnnnnnnnnnnnnnnnnnnnnnnnnnnnnnnnnnnnnnnnnnnnnnnnnnnnnnnnnnnnnnnnnnnnnnnnnnnnnnnnnnnnnnnnnnnnnnnnnnnnnnnnnnnnnnnnnnnnnnnnnnnnnnnnnnnnnnnnnnnnnnnnnnnnnnnnnnnnnnnnnnnnnnnnnnnnnnnnnnnnnnnnnnnnnnnnnnnnnnnnnnnnnnnnnnnnnnnnnnnnnnnnnnnnnnnnnnnnnnnnnnnnnnnnnnnnnnnnnnnnnnnnnnnnnnnnnnnnnnnnnnnnnnnnnnnnnnnnnnnnnnnnnnnnnnnnnnnnnnnnnnnnnnnnnnnnnnnnnnnnnnnnnnnnnnnnnnnnnnnnnnnnnnnnnnnnnnnnnnnnnnnnnnnnnnnnnnnnnnnnnnnnnnnnnnnnnnnnnnnnnnnnnnnnnnnnnnnnnnnnnnnnnnnnnnnnnnnnnnnnnnnnnnnnnnnnnnnnnnnnnnnnnnnnnnnnnnnnnnnnnnnnnnnnnnnnnnnnnnnnnnnnnnnnnnnnnnnnnnnnnnnnnnnnnnnnnnnnnnnnnnnnnnnnnnnnnnnnnnnnnnnnnnnnnnnnnnnnnnnnnnnnnnnnnnnnnnnnnnnnnnnnnnnnnnnnnnnnnnnnnnnnnnnnnnnnnnnnnnnnnnnnnnnnnnnnnnnnnnnnnnnnnnnnnnnnnnnnnnnnnnnnnnnnnnnnnnnnnnnnnnnnnnnnnnnnnnnnnnnnnnnnnnnnnnnnnnnnnnnnnnnnnnnnnnnnnnnnnnnnnnnnnnnnnnnnnnnnnnnnnnnnnnnnnnnnnnnnnnnnnnnnnnnnnnnnnnnnnnnnnnnnnnnnnnnnnnnnnnnnnnnnnnnnnnnnnnnnnnnnnnnnnnnnnnnnnnnnnnnnnnnnnnnnnnnnnnnnnnnnnnnnnnnnnnnnnnnnnnnnnnnnnnnnnnnnnnnnnnnnnnnnnnnnnnnnnnnnnnnnnnnnnnnnnnnnnnnnnnnnnnnnnnnnnnnnnnnnnnnnnnnnnnnnnnnnnnnnnnnnnnnnnnnnnnnnnnnnnnnnnnnnnnnnnnnnnnnnnnnnnnnnnnnnnnnnnnnnnnnnnnnnnnnnnnnnnnnnnnnnnnnnnnnnnnnnnnnnnnnnnnnnnnnnnnnnnnnnnnnnnnnnnnnnnnnnnnnnnnnnnnnnnnnnnnnnnnnnnnnnnnnnnnnnnnnnnnnnnnnnnnnnnnnnnnnnnnnnnnnnnnnnnnnnnnnnnnnnnnnnnnnnnnnnnnnnnnnnnnnnnnnnnnnnnnnnnnnnnnnnnnnnnnnnnnnnnnnnnnnnnnnnnnnnnnnnnnnnnnnnnnnnnnnnnnnnnnnnnnnnnnnnnnnnnnnnnnnnnnnnnnnnnnnnnnnnnnnnnnnnnnnnnnnnnnnnnnnnnnnnnnnnnnnnnnnnnnnnnnnnnnnnnnnnnnnnnnnnnnnnnnnnnnnnnnnnnnnnnnnnnnnnnnnnnnnnnnnnnnnnnnnnnnnnnnnnnnnnnnnnnnnnnnnnnnnnnnnnnnnnnnnnnnnnnnnnnnnnnnnnnnnnnnnnnnnnnnnnnnnnnnnnnnnnnnnnnnnnnnnnnnnnnnnnnnnnnnnnnnnnnnnnnnnnnnnnnnnnnnnnnnnnnnnnnnnnnnnnnnnnnnnnnnnnnnnnnnnnnnnnnnnnnnnnnnnnnnnnnnnnnnnnnnnnnnnnnnnnnnnnnnnnnnnnnnnnnnnnnnnnnnnnnnnnnnnnnnnnnnnnnnnnnnnnnnnnnnnnnnnnnnnnnnnnnnnnnnnnnnnnnnnnnnnnnnnnnnnnnnnnnnnnnnnnnnnnnnnnnnnnnnnnnnnnnnnnnnnnnnnnnnnnnnnnnnnnnnnnnnnnnnnnnnnnnnnnnnnnnnnnnnnnnnnnnnnnnnnnnnnnnnnnnnnnnnnnnnnnnnnnnnnnnnnnnnnnnnnnnnnnnnnnnnnnnnnnnnnnnnnnnnnnnnnnnnnnnnnnnnnnnnnnnnnnnnnnnnnnnnnnnnnnnnnnnnnnnnnnnnnnnnnnnnnnnnnnnnnnnnnnnnnnnnnnnnnnnnnnnnnnnnnnnnnnnnnnnnnnnnnnnnnnnnnnnnnnnnnnnnnnnnnnnnnnnnnnnnnnnnnnnnnnnnnnnnnnnnnnnnnnnnnnnnnnnnnnnnnnnnnnnnnnnnnnnnnnnnnnnnnnnnnnnnnnnnnnnnnnnnnnnnnnnnnnnnnnnnnnnnnnnnnnnnnnnnnnnnnnnnnnnnnnnnnnnnnnnnnnnnnnnnnnnnnnnnnnnnnnnnnnnnnnnnnnnnnnnnnnnnnnnnnnnnnnnnnnnnnnnnnnnnnnnnnnnnnnnnnnnnnnnnnnnnnnnnnnnnnnnnnnnnnnnnnnnnnnnnnnnnnnnnnnnnnnnnnnnnnnnnnnnnnnnnnnnnnnnnnnnnnnnnnnnnnnnnnnnnnnnnnnnnnnnnnnnnnnnnnnnnnnnnnnnnnnnnnnnnnnnnnnnnnnnnnnnnnnnnnnnnnnnnnnnnnnnnnnnnnnnnnnnnnnnnnnnnnnnnnnnnnnnnnnnnnnnnnnnnnnnnnnnnnnnnnnnnnnnnnnnnnnnnnnnnnnnnnnnnnnnnnnnnnnnnnnnnnnnnnnnnnnnnnnnnnnnnnnnnnnnnnnnnnnnnnnnnnnnnnnnnnnnnnnnnnnnnnnnnnnnnnnnnnnnnnnnnnnnnnnnnnnnnnnnnnnnnnnnnnnnnnnnnnnnnnnnnnnnnnnnnnnnnnnnnnnnnnnnnnnnnnnnnnnnnnnnnnnnnnnnnnnnnnnnnnnnnnnnnnnnnnnnnnnnnnnnnnnnnnnnnnnnnnnnnnnnnnnnnnnnnnnnnnnnnnnnnnnnnnnnnnnnnnnnnnnnnnnnnnnnnnnnnnnnnnnnnnnnnnnnnnnnnnnnnnnnnnnnnnnnnnnnnnnnnnnnnnnnnnnnnnnnnnnnnnnnnnnnnnnnnnnnnnnnnnnnnnnnnnnnnnnnnnnnnnnnnnnnnnnnnnnnnnnnnnnnnnnnnnnnnnnnnnnnnnnnnnnnnnnnnnnnnnnnnnnnnnnnnnnnnnnnnnnnnnnnnnnnnnnnnnnnnnnnnnnnnnnnnnnnnnnnnnnnnnnnnnnnnnnnnnnnnnnnnnnnnnnnnnnnnnnnnnnnnnnnnnnnnnnnnnnnnnnnnnnnnnnnnnnnnnnnnnnnnnnnnnnnnnnnnnnnnnnnnnnnnnnnnnnnnnnnnnnnnnnnnnnnnnnnnnnnnnnnnnnnnnnnnnnnnnnnnnnnnnnnnnnnnnnnnnnnnnnnnnnnnnnnnnnnnnnnnnnnnnnnnnnnnnnnnnnnnnnnnnnnnnnnnnnnnnnnnnnnnnnnnnnnnnnnnnnnnnnnnnnnnnnnnnnnnnnnnnnnnnnnnnnnnnnnnnnnnnnnnnnnnnnnnnnnnnnnnnnnnnnnnnnnnnnnnnnnnnnnnnnnnnnnnnnnnnnnnnnnnnnnnnnnnnnnnnnnnnnnnnnnnnnnnnnnnnnnnnnnnnnnnnnnnnnnnnnnnnnnnnnnnnnnnnnnnnnnnnnnnnnnnnnnnnnnnnnnnnnnnnnnnnnnnnnnnnnnnnnnnnnnnnnnnnnnnnnnnnnnnnnnnnnnnnnnnnnnnnnnnnnnnnnnnnnnnnnnnnnnnnnnnnnnnnnnnnnnnnnnnnnnnnnnnnnnnnnnnnnnnnnnnnnnnnnnnnnnnnnnnnnnnnnnnnnnnnnnnnnnnnnnnnnnnnnnnnnnnnnnnnnnnnnnnnnnnnnnnnnnnnnnnnnnnnnnnnnnnnnnnnnnnnnnnnnnnnnnnnnnnnnnnnnnnnnnnnnnnnnnnnnnnnnnnnnnnnnnnnnnnnnnnnnnnnnnnnnnnnnnnnnnnnnnnnnnnnnnnnnnnnnnnnnnnnnnnnnnnnnnnnnnnnnnnnnnnnnnnnnnnnnnnnnnnnnnnnnnnnnnnnnnnnnnnnnnnnnnnnnnnnnnnnnnnnnnnnnnnnnnnnnnnnnnnnnnnnnnnnnnnnnnnnnnnnnnnnnnnnnnnnnnnnnnnnnnnnnnnnnnnnnnnnnnnnnnnnnnnnnnnnnnnnnnnnnnnnnnnnnnnnnnnnnnnnnnnnnnnnnnnnnnnnnnnnnnnnnnnnnnnnnnnnnnnnnnnnnnnnnnnnnnnnnnnnnnnnnnnnnnnnnnnnnnnnnnnnnnnnnnnnnnnnnnnnnnnnnnnnnnnnnnnnnnnnnnnnnnnnnnnnnnnnnnnnnnnnnnnnnnnnnnnnnnnnnnnnnnnnnnnnnnnnnnnnnnnnnnnnnnnnnnnnnnnnnnnnnnnnnnnnnnnnnnnnnnnnnnnnnnnnnnnnnnnnnnnnnnnnnnnnnnnnnnnnnnnnnnnnnnnnnnnnnnnnnnnnnnnnnnnnnnnnnnnnnnnnnnnnnnnnnnnnnnnnnnnnnnnnnnnnnnnnnnnnnnnnnnnnnnnnnnnnnnnnnnnnnnnnnnnnnnnnnnnnnnnnnnnnnnnnnnnnnnnnnnnnnnnnnnnnnnnnnnnnnnnnnnnnnnnnnnnnnnnnnnnnnnnnnnnnnnnnnnnnnnnnnnnnnnnnnnnnnnnnnnnnnnnnnnnnnnnnnnnnnnnnnnnnnnnnnnnnnnnnnnnnnnnnnnnnnnnnnnnnnnnnnnnnnnnnnnnnnnnnnnnnnnnnnnnnnnnnnnnnnnnnnnnnnnnnnnnnnnnnnnnnnnnnnnnnnnnnnnnnnnnnnnnnnnnnnnnnnnnnnnnnnnnnnnnnnnnnnnnnnnnnnnnnnnnnnnnnnnnnnnnnnnnnnnnnnnnnnnnnnnnnnnnnnnnnnnnnnnnnnnnnnnnnnnnnnnnnnnnnnnnnnnnnnnnnnnnnnnnnnnnnnnnnnnnnnnnnnnnnnnnnnnnnnnnnnnnnnnnnnnnnnnnnnnnnnnnnnnnnnnnnnnnnnnnnnnnnnnnnnnnnnnnnnnnnnnnnnnnnnnnnnnnnnnnnnnnnnnnnnnnnnnnnnnnnnnnnnnnnnnnnnnnnnnnnnnnnnnnnnnnnnnnnnnnnnnnnnnnnnnnnnnnnnnnnnnnnnnnnnnnnnnnnnnnnnnnnnnnnnnnnnnnnnnnnnnnnnnnnnnnnnnnnnnnnnnnnnnnnnnnnnnnnnnnnnnnnnnnnnnnnnnnnnnnnnnnnnnnnnnnnnnnnnnnnnnnnnnnnnnnnnnnnnnnnnnnnnnnnnnnnnnnnnnnnnnnnnnnnnnnnnnnnnnnnnnnnnnnnnnnnnnnnnnnnnnnnnnnnnnnnnnnnnnnnnnnnnnnnnnnnnnnnnnnnnnnnnnnnnnnnnnnnnnnnnnnnnnnnnnnnnnnnnnnnnnnnnnnnnnnnnnnnnnnnnnnnnnnnnnnnnnnnnnnnnnnnnnnnnnnnnnnnnnnnnnnnnnnnnnnnnnnnnnnnnnnnnnnnnnnnnnnnnnnnnnnnnnnnnnnnnnnnnnnnnnnnnnnnnnnnnnnnnnnnnnnnnnnnnnnnnnnnnnnnnnnnnnnnnnnnnnnnnnnnnnnnnnnnnnnnnnnnnnnnnnnnnnnnnnnnnnnnnnnnnnnnnnnnnnnnnnnnnnnnnnnnnnnnnnnnnnnnnnnnnnnnnnnnnnnnnnnnnnnnnnnnnnnnnnnnnnnnnnnnnnnnnnnnnnnnnnnnnnnnnnnnnnnnnnnnnnnnnnnnnnnnnnnnnnnnnnnnnnnnnnnnnnnnnnnnnnnnnnnnnnnnnnnnnnnnnnnnnnnnnnnnnnnnnnnnnnnnnnnnnnnnnnnnnnnnnnnnnnnnnnnnnnnnnnnnnnnnnnnnnnnnnnnnnnnnnnnnnnnnnnnnnnnnnnnnnnnnnnnnnnnnnnnnnnnnnnnnnnnnnnnnnnnnnnnnnnnnnnnnnnnnnnnnnnnnnnnnnnnnnnnnnnnnnnnnnnnnnnnnnnnnnnnnnnnnnnnnnnnnnnnnnnnnnnnnnnnnnnnnnnnnnnnnnnnnnnnnnnnnnnnnnnnnnnnnnnnnnnnnnnnnnnnnnnnnnnnnnnnnnnnnnnnnnnnnnnnnnnnnnnnnnnnnnnnnnnnnnnnnnnnnnnnnnnnnnnnnnnnnnnnnnnnnnnnnnnnnnnnnnnnnnnnnnnnnnnnnnnnnnnnnnnnnnnnnnnnnnnnnnnnnnnnnnnnnnnnnnnnnnnnnnnnnnnnnnnnnnnnnnnnnnnnnnnnnnnnnnnnnnnnnnnnnnnnnnnnnnnnnnnnnnnnnnnnnnnnnnnnnnnnnnnnnnnnnnnnnnnnnnnnnnnnnnnnnnnnnnnnnnnnnnnnnnnnnnnnnnnnnnnnnnnnnnnnnnnnnnnnnnnnnnnnnnnnnnnnnnnnnnnnnnnnnnnnnnnnnnnnnnnnnnnnnnnnnnnnnnnnnnnnnnnnnnnnnnnnnnnnnnnnnnnnnnnnnnnnnnnnnnnnnnnnnnnnnnnnnnnnnnnnnnnnnnnnnnnnnnnnnnnnnnnnnnnnnnnnnnnnnnnnnnnnnnnnnnnnnnnnnnnnnnnnnnnnnnnnnnnnnnnnnnnnnnnnnnnnnnnnnnnnnnnnnnnnnnnnnnnnnnnnnnnnnnnnnnnnnnnnnnnnnnnnnnnnnnnnnnnnnnnnnnnnnnnnnnnnnnnnnnnnnnnnnnnnnnnnnnnnnnnnnnnnnnnnnnnnnnnnnnnnnnnnnnnnnnnnnnnnnnnnnnnnnnnnnnnnnnnnnnnnnnnnnnnnnnnnnnnnnnnnnnnnnnnnnnnnnnnnnnnnnnnnnnnnnnnnnnnnnnnnnnnnnnnnnnnnnnnnnnnnnnnnnnnnnnnnnnnnnnnnnnnnnnnnnnnnnnnnnnnnnnnnnnnnnnnnnnnnnnnnnnnnnnnnnnnnnnnnnnnnnnnnnnnnnnnnnnnnnnnnnnnnnnnnnnnnnnnnnnnnnnnnnnnnnnnnnnnnnnnnnnnnnnnnnnnnnnnnnnnnnnnnnnnnnnnnnnnnnnnnnnnnnnnnnnnnnnnnnnnnnnnnnnnnnnnnnnnnnnnnnnnnnnnnnnnnnnnnnnnnnnnnnnnnnnnnnnnnnnnnnnnnnnnnnnnnnnnnnnnnnnnnnnnnnnnnnnnnnnnnnnnnnnnnnnnnnnnnnnnnnnnnnnnnnnnnnnnnnnnnnnnnnnnnnnnnnnnnnnnnnnnnnnnnnnnnnnnnnnnnnnnnnnnnnnnnnnnnnnnnnnnnnnnnnnnnnnnnnnnnnnnnnnnnnnnnnnnnnnnnnnnnnnnnnnnnnnnnnnnnnnnnnnnnnnnnnnnnnnnnnnnnnnnnnnnnnnnnnnnnnnnnnnnnnnnnnnnnnnnnnnnnnnnnnnnnnnnnnnnnnnnnnnnnnnnnnnnnnnnnnnnnnnnnnnnnnnnnnnnnnnnnnnnnnnnnnnnnnnnnnnnnnnnnnnnnnnnnnnnnnnnnnnnnnnnnnnnnnnnnnnnnnnnnnnnnnnnnnnnnnnnnnnnnnnnnnnnnnnnnnnnnnnnnnnnnnnnnnnnnnnnnnnnnnnnnnnnnnnnnnnnnnnnnnnnnnnnnnnnnnnnnnnnnnnnnnnnnnnnnnnnnnnnnnnnnnnnnnnnnnnnnnnnnnnnnnnnnnnnnnnnnnnnnnnnnnnnnnnnnnnnnnnnnnnnnnnnnnnnnnnnnnnnnnnnnnnnnnnnnnnnnnnnnnnnnnnnnnnnnnnnnnnnnnnnnnnnnnnnnnnnnnnnnnnnnnnnnnnnnnnnnnnnnnnnnnnnnnnnnnnnnnnnnnnnnnnnnnnnnnnnnnnnnnnnnnnnnnnnnnnnnnnnnnnnnnnnnnnnnnnnnnnnnnnnnnnnnnnnnnnnnnnnnnnnnnnnnnnnnnnnnnnnnnnnnnnnnnnnnnnnnnnnnnnnnnnnnnnnnnnnnnnnnnnnnnnnnnnnnnnnnnnnnnnnnnnnnnnnnnnnnnnnnnnnnnnnnnnnnnnnnnnnnnnnnnnnnnnnnnnnnnnnnnnnnnnnnnnnnnnnnnnnnnnnnnnnnnnnnnnnnnnnnnnnnnnnnnnnnnnnnnnnnnnnnnnnnnnnnnnnnnnnnnnnnnnnnnnnnnnnnnnnnnnnnnnnnnnnnnnnnnnnnnnnnnnnnnnnnnnnnnnnnnnnnnnnnnnnnnnnnnnnnnnnnnnnnnnnnnnnnnnnnnnnnnnnnnnnnnnnnnnnnnnnnnnnnnnnnnnnnnnnnnnnnnnnnnnnnnnnnnnnnnnnnnnnnnnnnnnnnnnnnnnnnnnnnnnnnnnnnnnnnnnnnnnnnnnnnnnnnnnnnnnnnnnnnnnnnnnnnnnnnnnnnnnnnnnnnnnnnnnnnnnnnnnnnnnnnnnnnnnnnnnnnnnnnnnnnnnnnnnnnnnnnnnnnnnnnnnnnnnnnnnnnnnnnnnnnnnnnnnnnnnnnnnnnnnnnnnnnnnnnnnnnnnnnnnnnnnnnnnnnnnnnnnnnnnnnnnnnnnnnnnnnnnnnnnnnnnnnnnnnnnnnnnnnnnnnnnnnnnnnnnnnnnnnnnnnnnnnnnnnnnnnnnnnnnnnnnnnnnnnnnnnnnnnnnnnnnnnnnnnnnnnnnnnnnnnnnnnnnnnnnnnnnnnnnnnnnnnnnnnnnnnnnnnnnnnnnnnnnnnnnnnnnnnnnnnnnnnnnnnnnnnnnnnnnnnnnnnnnnnnnnnnnnnnnnnnnnnnnnnnnnnnnnnnnnnnnnnnnnnnnnnnnnnnnnnnnnnnnnnnnnnnnnnnnnnnnnnnnnnnnnnnnnnnnnnnnnnnnnnnnnnnnnnnnnnnnnnnnnnnnnnnnnnnnnnnnnnnnnnnnnnnnnnnnnnnnnnnnnnnnnnnnnnnnnnnnnnnnnnnnnnnnnnnnnnnnnnnnnnnnnnnnnnnnnnnnnnnnnnnnnnnnnnnnnnnnnnnnnnnnnnnnnnnnnnnnnnnnnnnnnnnnnnnnnnnnnnnnnnnnnnnnnnnnnnnnnnnnnnnnnnnnnnnnnnnnnnnnnnnnnnnnnnnnnnnnnnnnnnnnnnnnnnnnnnnnnnnnnnnnnnnnnnnnnnnnnnnnnnnnnnnnnnnnnnnnnnnnnnnnnnnnnnnnnnnnnnnnnnnnnnnnnnnnnnnnnnnnnnnnnnnnnnnnnnnnnnnnnnnnnnnnnnnnnnnnnnnnnnnnnnnnnnnnnnnnnnnnnnnnnnnnnnnnnnnnnnnnnnnnnnnnnnnnnnnnnnnnnnnnnnnnnnnnnnnnnnnnnnnnnnnnnnnnnnnnnnnnnnnnnnnnnnnnnnnnnnnnnnnnnnnnnnnnnnnnnnnnnnnnnnnnnnnnnnnnnnnnnnnnnnnnnnnnnnnnnnnnnnnnnnnnnnnnnnnnnnnnnnnnnnnnnnnnnnnnnnnnnnnnnnnnnnnnnnnnnnnnnnnnnnnnnnnnnnnnnnnnnnnnnnnnnnnnnnnnnnnnnnnnnnnnnnnnnnnnnnnnnnnnnnnnnnnnnnnnnnnnnnnnnnnnnnnnnnnnnnnnnnnnnnnnnnnnnnnnnnnnnnnnnnnnnnnnnnnnnnnnnnnnnnnnnnnnnnnnnnnnnnnnnnnnnnnnnnnnnnnnnnnnnnnnnnnnnnnnnnnnnnnnnnnnnnnnnnnnnnnnnnnnnnnnnnnnnnnnnnnnnnnnnnnnnnnnnnnnnnnnnnnnnnnnnnnnnnnnnnnnnnnnnnnnnnnnnnnnnnnnnnnnnnnnnnnnnnnnnnnnnnnnnnnnnnnnnnnnnnnnnnnnnnnnnnnnnnnnnnnnnnnnnnnnnnnnnnnnnnnnnnnnnnnnnnnnnnnnnnnnnnnnnnnnnnnnnnnnnnnnnnnnnnnnnnnnnnnnnnnnnnnnnnnnnnnnnnnnnnnnnnnnnnnnnnnnnnnnnnnnnnnnnnnnnnnnnnnnnnnnnnnnnnnnnnnnnnnnnnnnnnnnnnnnnnnnnnnnnnnnnnnnnnnnnnnnnnnnnnnnnnnnnnnnnnnnnnnnnnnnnnnnnnnnnnnnnnnnnnnnnnnnnnnnnnnnnnnnnnnnnnnnnnnnnnnnnnnnnnnnnnnnnnnnnnnnnnnnnnnnnnnnnnnnnnnnnnnnnnnnnnnnnnnnnnnnnnnnnnnnnnnnnnnnnnnnnnnnnnnnnnnnnnnnnnnnnnnnnnnnnnnnnnnnnnnnnnnnnnnnnnnnnnnnnnnnnnnnnnnnnnnnnnnnnnnnnnnnnnnnnnnnnnnnnnnnnnnnnnnnnnnnnnnnnnnnnnnnnnnnnnnnnnnnnnnnnnnnnnnnnnnnnnnnnnnnnnnnnnnnnnnnnnnnnnnnnnnnnnnnnnnnnnnnnnnnnnnnnnnnnnnnnnnnnnnnnnnnnnnnnnnnnnnnnnnnnnnnnnnnnnnnnnnnnnnnnnnnnnnnnnnnnnnnnnnnnnnnnnnnnnnnnnnnnnnnnnnnnnnnnnnnnnnnnnnnnnnnnnnnnnnnnnnnnnnnnnnnnnnnnnnnnnnnnnnnnnnnnnnnnnnnnnnnnnnnnnnnnnnnnnnnnnnnnnnnnnnnnnnnnnnnnnnnnnnnnnnnnnnnnnnnnnnnnnnnnnnnnnnnnnnnnnnnnnnnnnnnnnnnnnnnnnnnnnnnnnnnnnnnnnnnnnnnnnnnnnnnnnnnnnnnnnnnnnnnnnnnnnnnnnnnnnnnnnnnnnnnnnnnnnnnnnnnnnnnnnnnnnnnnnnnnnnnnnnnnnnnnnnnnnnnnnnnnnnnnnnnnnnnnnnnnnnnnnnnnnnnnnnnnnnnnnnnnnnnnnnnnnnnnnnnnnnnnnnnnnnnnnnnnnnnnnnnnnnnnnnnnnnnnnnnnnnnnnnnnnnnnnnnnnnnnnnnnnnnnnnnnnnnnnnnnnnnnnnnnnnnnnnnnnnnnnnnnnnnnnnnnnnnnnnnnnnnnnnnnnnnnnnnnnnnnnnnnnnnnnnnnnnnnnnnnnnnnnnnnnnnnnnnnnnnnnnnnnnnnnnnnnnnnnnnnnnnnnnnnnnnnnnnnnnnnnnnnnnnnnnnnnnnnnnnnnnnnnnnnnnnnnnnnnnnnnnnnnnnnnnnnnnnnnnnnnnnnnnnnnnnnnnnnnnnnnnnnnnnnnnnnnnnnnnnnnnnnnnnnnnnnnnnnnnnnnnnnnnnnnnnnnnnnnnnnnnnnnnnnnnnnnnnnnnnnnnnnnnnnnnnnnnnnnnnnnnnnnnnnnnnnnnnnnnnnnnnnnnnnnnnnnnnnnnnnnnnnnnnnnnnnnnnnnnnnnnnnnnnnnnnnnnnnnnnnnnnnnnnnnnnnnnnnnnnnnnnnnnnnnnnnnnnnnnnnnnnnnnnnnnnnnnnnnnnnnnnnnnnnnnnnnnnnnnnnnnnnnnnnnnnnnnnnnnnnnnnnnnnnnnnnnnnnnnnnnnnnnnnnnnnnnnnnnnnnnnnnnnnnnnnnnnnnnnnnnnnnnnnnnnnnnnnnnnnnnnnnnnnnnnnnnnnnnnnnnnnnnnnnnnnnnnnnnnnnnnnnnnnnnnnnnnnnnnnnnnnnnnnnnnnnnnnnnnnnnnnnnnnnnnnnnnnnnnnnnnnnnnnnnnnnnnnnnnnnnnnnnnnnnnnnnnnnnnnnnnnnnnnnnnnnnnnnnnnnnnnnnnnnnnnnnnnnnnnnnnnnnnnnnnnnnnnnnnnnnnnnnnnnnnnnnnnnnnnnnnnnnnnnnnnnnnnnnnnnnnnnnnnnnnnnnnnnnnnnnnnnnnnnnnnnnnnnnnnnnnnnnnnnnnnnnnnnnnnnnnnnnnnnnnnnnnnnnnnnnnnnnnnnnnnnnnnnnnnnnnnnnnnnnnnnnnnnnnnnnnnnnnnnnnnnnnnnnnnnnnnnnnnnnnnnnnnnnnnnnnnnnnnnnnnnnnnnnnnnnnnnnnnnnnnnnnnnnnnnnnnnnnnnnnnnnnnnnnnnnnnnnnnnnnnnnnnnnnnnnnnnnnnnnnnnnnnnnnnnnnnnnnnnnnnnnnnnnnnnnnnnnnnnnnnnnnnnnnnnnnnnnnnnnnnnnnnnnnnnnnnnnnnnnnnnnnnnnnnnnnnnnnnnnnnnnnnnnnnnnnnnnnnnnnnnnnnnnnnnnnnnnnnnnnnnnnnnnnnnnnnnnnnnnnnnnnnnnnnnnnnnnnnnnnnnnnnnnnnnnnnnnnnnnnnnnnnnnnnnnnnnnnnnnnnnnnnnnnnnnnnnnnnnnnnnnnnnnnnnnnnnnnnnnnnnnnnnnnnnnnnnnnnnnnnnnnnnnnnnnnnnnnnnnnnnnnnnnnnnnnnnnnnnnnnnnnnnnnnnnnnnnnnnnnnnnnnnnnnnnnnnnnnnnnnnnnnnnnnnnnnnnnnnnnnnnnnnnnnnnnnnnnnnnnnnnnnnnnnnnnnnnnnnnnnnnnnnnnnnnnnnnnnnnnnnnnnnnnnnnnnnnnnnnnnnnnnnnnnnnnnnnnnnnnnnnnnnnnnnnnnnnnnnnnnnnnnnnnnnnnnnnnnnnnnnnnnnnnnnnnnnnnnnnnnnnnnnnnnnnnnnnnnnnnnnnnnnnnnnnnnnnnnnnnnnnnnnnnnnnnnnnnnnnnnnnnnnnnnnnnnnnnnnnnnnnnnnnnnnnnnnnnnnnnnnnnnnnnnnnnnnnnnnnnnnnnnnnnnnnnnnnnnnnnnnnnnnnnnnnnnnnnnnnnnnnnnnnnnnnnnnnnnnnnnnnnnnnnnnnnnnnnnnnnnnnnnnnnnnnnnnnnnnnnnnnnnnnnnnnnnnnnnnnnnnnnnnnnnnnnnnnnnnnnnnnnnnnnnnnnnnnnnnnnnnnnnnnnnnnnnnnnnnnnnnnnnnnnnnnnnnnnnnnnnnnnnnnnnnnnnnnnnnnnnnnnnnnnnnnnnnnnnnnnnnnnnnnnnnnnnnnnnnnnnnnnnnnnnnnnnnnnnnnnnnnnnnnnnnnnnnnnnnnnnnnnnnnnnnnnnnnnnnnnnnnnnnnnnnnnnnnnnnnnnnnnnnnnnnnnnnnnnnnnnnnnnnnnnnnnnnnnnnnnnnnnnnnnnnnnnnnnnnnnnnnnnnnnnnnnnnnnnnnnnnnnnnnnnnnnnnnnnnnnnnnnnnnnnnnnnnnnnnnnnnnnnnnnnnnnnnnnnnnnnnnnnnnnnnnnnnnnnnnnnnnnnnnnnnnnnnnnnnnnnnnnnnnnnnnnnnnnnnnnnnnnnnnnnnnnnnnnnnnnnnnnnnnnnnnnnnnnnnnnnnnnnnnnnnnnnnnnnnnnnnnnnnnnnnnnnnnnnnnnnnnnnnnnnnnnnnnnnnnnnnnnnnnnnnnnnnnnnnnnnnnnnnnnnnnnnnnnnnnnnnnnnnnnnnnnnnnnnnnnnnnnnnnnnnnnnnnnnnnnnnnnnnnnnnnnnnnnnnnnnnnnnnnnnnnnnnnnnnnnnnnnnnnnnnnnnnnnnnnnnnnnnnnnnnnnnnnnnnnnnnnnnnnnnnnnnnnnnnnnnnnnnnnnnnnnnnnnnnnnnnnnnnnnnnnnnnnnnnnnnnnnnnnnnnnnnnnnnnnnnnnnnnnnnnnnnnnnnnnnnnnnnnnnnnnnnnnnnnnnnnnnnnnnnnnnnnnnnnnnnnnnnnnnnnnnnnnnnnnnnnnnnnnnnnnnnnnnnnnnnnnnnnnnnnnnnnnnnnnnnnnnnnnnnnnnnnnnnnnnnnnnnnnnnnnnnnnnnnnnnnnnnnnnnnnnnnnnnnnnnnnnnnnnnnnnnnnnnnnnnnnnnnnnnnnnnnnnnnnnnnnnnnnnnnnnnnnnnnnnnnnnnnnnnnnnnnnnnnnnnnnnnnnnnnnnnnnnnnnnnnnnnnnnnnnnnnnnnnnnnnnnnnnnnnnnnnnnnnnnnnnnnnnnnnnnnnnnnnnnnnnnnnnnnnnnnnnnnnnnnnnnnnnnnnnnnnnnnnnnnnnnnnnnnnnnnnnnnnnnnnnnnnnnnnnnnnnnnnnnnnnnnnnnnnnnnnnnnnnnnnnnnnnnnnnnnnnnnnnnnnnnnnnnnnnnnnnnnnnnnnnnnnnnnnnnnnnnnnnnnnnnnnnnnnnnnnnnnnnnnnnnnnnnnnnnnnnnnnnnnnnnnnnnnnnnnnnnnnnnnnnnnnnnnnnnnnnnnnnnnnnnnnnnnnnnnnnnnnnnnnnnnnnnnnnnnnnnnnnnnnnnnnnnnnnnnnnnnnnnnnnnnnnnnnnnnnnnnnnnnnnnnnnnnnnnnnnnnnnnnnnnnnnnnnnnnnnnnnnnnnnnnnnnnnnnnnnnnnnnnnnnnnnnnnnnnnnnnnnnnnnnnnnnnnnnnnnnnnnnnnnnnnnnnnnnnnnnnnnnnnnnnnnnnnnnnnnnnnnnnnnnnnnnnnnnnnnnnnnnnnnnnnnnnnnnnnnnnnnnnnnnnnnnnnnnnnnnnnnnnnnnnnnnnnnnnnnnnnnnnnnnnnnnnnnnnnnnnnnnnnnnnnnnnnnnnnnnnnnnnnnnnnnnnnnnnnnnnnnnnnnnnnnnnnnnnnnnnnnnnnnnnnnnnnnnnnnnnnnnnnnnnnnnnnnnnnnnnnnnnnnnnnnnnnnnnnnnnnnnnnnnnnnnnnnnnnnnnnnnnnnnnnnnnnnnnnnnnnnnnnnnnnnnnnnnnnnnnnnnnnnnnnnnnnnnnnnnnnnnnnnnnnnnnnnnnnnnnnnnnnnnnnnnnnnnnnnnnnnnnnnnnnnnnnnnnnnnnnnnnnnnnnnnnnnnnnnnnnnnnnnnnnnnnnnnnnnnnnnnnnnnnnnnnnnnnnnnnnnnnnnnnnnnnnnnnnnnnnnnnnnnnnnnnnnnnnnnnnnnnnnnnnnnnnnnnnnnnnnnnnnnnnnnnnnnnnnnnnnnnnnnnnnnnnnnnnnnnnnnnnnnnnnnnnnnnnnnnnnnnnnnnnnnnnnnnnnnnnnnnnnnnnnnnnnnnnnnnnnnnnnnnnnnnnnnnnnnnnnnnnnnnnnnnnnnnnnnnnnnnnnnnnnnnnnnnnnnnnnnnnnnnnnnnnnnnnnnnnnnnnnnnnnnnnnnnnnnnnnnnnnnnnnnnnnnnnnnnnnnnnnnnnnnnnnnnnnnnnnnnnnnnnnnnnnnnnnnnnnnnnnnnnnnnnnnnnnnnnnnnnnnnnnnnnnnnnnnnnnnnnnnnnnnnnnnnnnnnnnnnnnnnnnnnnnnnnnnnnnnnnnnnnnnnnnnnnnnnnnnnnnnnnnnnnnnnnnnnnnnnnnnnnnnnnnnnnnnnnnnnnnnnnnnnnnnnnnnnnnnnnnnnnnnnnnnnnnnnnnnnnnnnnnnnnnnnnnnnnnnnnnnnnnnnnnnnnnnnnnnnnnnnnnnnnnnnnnnnnnnnnnnnnnnnnnnnnnnnnnnnnnnnnnnnnnnnnnnnnnnnnnnnnnnnnnnnnnnnnnnnnnnnnnnnnnnnnnnnnnnnnnnnnnnnnnnnnnnnnnnnnnnnnnnnnnnnnnnnnnnnnnnnnnnnnnnnnnnnnnnnnnnnnnnnnnnnnnnnnnnnnnnnnnnnnnnnnnnnnnnnnnnnnnnnnnnnnnnnnnnnnnnnnnnnnnnnnnnnnnnnnnnnnnnnnnnnnnnnnnnnnnnnnnnnnnnnnnnnnnnnnnnnnnnnnnnnnnnnnnnnnnnnnnnnnnnnnnnnnnnnnnnnnnnnnnnnnnnnnnnnnnnnnnnnnnnnnnnnnnnnnnnnnnnnnnnnnnnnnnnnnnnnnnnnnnnnnnnnnnnnnnnnnnnnnnnnnnnnnnnnnnnnnnnnnnnnnnnnnnnnnnnnnnnnnnnnnnnnnnnnnnnnnnnnnnnnnnnnnnnnnnnnnnnnnnnnnnnnnnnnnnnnnnnnnnnnnnnnnnnnnnnnnnnnnnnnnnnnnnnnnnnnnnnnnnnnnnnnnnnnnnnnnnnnnnnnnnnnnnnnnnnnnnnnnnnnnnnnnnnnnnnnnnnnnnnnnnnnnnnnnnnnnnnnnnnnnnnnnnnnnnnnnnnnnnnnnnnnnnnnnnnnnnnnnnnnnnnnnnnnnnnnnnnnnnnnnnnnnnnnnnnnnnnnnnnnnnnnnnnnnnnnnnnnnnnnnnnnnnnnnnnnnnnnnnnnnnnnnnnnnnnnnnnnnnnnnnnnnnnnnnnnnnnnnnnnnnnnnnnnnnnnnnnnnnnnnnnnnnnnnnnnnnnnnnnnnnnnnnnnnnnnnnnnnnnnnnnnnnnnnnnnnnnnnnnnnnnnnnnnnnnnnnnnnnnnnnnnnnnnnnnnnnnnnnnnnnnnnnnnnnnnnnnnnnnnnnnnnnnnnnnnnnnnnnnnnnnnnnnnnnnnnnnnnnnnnnnnnnnnnnnnnnnnnnnnnnnnnnnnnnnnnnnnnnnnnnnnnnnnnnnnnnnnnnnnnnnnnnnnnnnnnnnnnnnnnnnnnnnnnnnnnnnnnnnnnnnnnnnnnnnnnnnnnnnnnnnnnnnnnnnnnnnnnnnnnnnnnnnnnnnnnnnnnnnnnnnnnnnnnnnnnnnnnnnnnnnnnnnnnnnnnnnnnnnnnnnnnnnnnnnnnnnnnnnnnnnnnnnnnnnnnnnnnnnnnnnnnnnnnnnnnnnnnnnnnnnnnnnnnnnnnnnnnnnnnnnnnnnnnnnnnnnnnnnnnnnnnnnnnnnnnnnnnnnnnnnnnnnnnnnnnnnnnnnnnnnnnnnnnnnnnnnnnnnnnnnnnnnnnnnnnnnnnnnnnnnnnnnnnnnnnnnnnnnnnnnnnnnnnnnnnnnnnnnnnnnnnnnnnnnnnnnnnnnnnnnnnnnnnnnnnnnnnnnnnnnnnnnnnnnnnnnnnnnnnnnnnnnnnnnnnnnnnnnnnnnnnnnnnnnnnnnnnnnnnnnnnnnnnnnnnnnnnnnnnnnnnnnnnnnnnnnnnnnnnnnnnnnnnnnnnnnnnnnnnnnnnnnnnnnnnnnnnnnnnnnnnnnnnnnnnnnnnnnnnnnnnnnnnnnnnnnnnnnnnnnnnnnnnnnnnnnnnnnnnnnnnnnnnnnnnnnnnnnnnnnnnnnnnnnnnnnnnnnnnnnnnnnnnnnnnnnnnnnnnnnnnnnnnnnnnnnnnnnnnnnnnnnnnnnnnnnnnnnnnnnnnnnnnnnnnnnnnnnnnnnnnnnnnnnnnnnnnnnnnnnnnnnnnnnnnnnnnnnnnnnnnnnnnnnnnnnnnnnnnnnnnnnnnnnnnnnnnnnnnnnnnnnnnnnnnnnnnnnnnnnnnnnnnnnnnnnnnnnnnnnnnnnnnnnnnnnnnnnnnnnnnnnnnnnnnnnnnnnnnnnnnnnnnnnnnnnnnnnnnnnnnnnnnnnnnnnnnnnnnnnnnnnnnnnnnnnnnnnnnnnnnnnnnnnnnnnnnnnnnnnnnnnnnnnnnnnnnnnnnnnnnnnnnnnnnnnnnnnnnnnnnnnnnnnnnnnnnnnnnnnnnnnnnnnnnnnnnnnnnnnnnnnnnnnnnnnnnnnnnnnnnnnnnnnnnnnnnnnnnnnnnnnnnnnnnnnnnnnnnnnnnnnnnnnnnnnnnnnnnnnnnnnnnnnnnnnnnnnnnnnnnnnnnnnnnnnnnnnnnnnnnnnnnnnnnnnnnnnnnnnnnnnnnnnnnnnnnnnnnnnnnnnnnnnnnnnnnnnnnnnnnnnnnnnnnnnnnnnnnnnnnnnnnnnnnnnnnnnnnnnnnnnnnnnnnnnnnnnnnnnnnnnnnnnnnnnnnnnnnnnnnnnnnnnnnnnnnnnnnnnnnnnnnnnnnnnnnnnnnnnnnnnnnnnnnnnnnnnnnnnnnnnnnnnnnnnnnnnnnnnnnnnnnnnnnnnnnnnnnnnnnnnnnnnnnnnnnnnnnnnnnnnnnnnnnnnnnnnnnnnnnnnnnnnnnnnnnnnnnnnnnnnnnnnnnnnnnnnnnnnnnnnnnnnnnnnnnnnnnnnnnnnnnnnnnnnnnnnnnnnnnnnnnnnnnnnnnnnnnnnnnnnnnnnnnnnnnnnnnnnnnnnnnnnnnnnnnnnnnnnnnnnnnnnnnnnnnnnnnnnnnnnnnnnnnnnnnnnnnnnnnnnnnnnnnnnnnnnnnnnnnnnnnnnnnnnnnnnnnnnnnnnnnnnnnnnnnnnnnnnnnnnnnnnnnnnnnnnnnnnnnnnnnnnnnnnnnnnnnnnnnnnnnnnnnnnnnnnnnnnnnnnnnnnnnnnnnnnnnnnnnnnnnnnnnnnnnnnnnnnnnnnnnnnnnnnnnnnnnnnnnnnnnnnnnnnnnnnnnnnnnnnnnnnnnnnnnnnnnnnnnnnnnnnnnnnnnnnnnnnnnnnnnnnnnnnnnnnnnnnnnnnnnnnnnnnnnnnnnnnnnnnnnnnnnnnnnnnnnnnnnnnnnnnnnnnnnnnnnnnnnnnnnnnnnnnnnnnnnnnnnnnnnnnnnnnnnnnnnnnnnnnnnnnnnnnnnnnnnnnnnnnnnnnnnnnnnnnnnnnnnnnnnnnnnnnnnnnnnnnnnnnnnnnnnnnnnnnnnnnnnnnnnnnnnnnnnnnnnnnnnnnnnnnnnnnnnnnnnnnnnnnnnnnnnnnnnnnnnnnnnnnnnnnnnnnnnnnnnnnnnnnnnnnnnnnnnnnnnnnnnnnnnnnnnnnnnnnnnnnnnnnnnnnnnnnnnnnnnnnnnnnnnnnnnnnnnnnnnnnnnnnnnnnnnnnnnnnnnnnnnnnnnnnnnnnnnnnnnnnnnnnnnnnnnnnnnnnnnnnnnnnnnnnnnnnnnnnnnnnnnnnnnnnnnnnnnnnnnnnnnnnnnnnnnnnnnnnnnnnnnnnnnnnnnnnnnnnnnnnnnnnnnnnnnnnnnnnnnnnnnnnnnnnnnnnnnnnnnnnnnnnnnnnnnnnnnnnnnnnnnnnnnnnnnnnnnnnnnnnnnnnnnnnnnnnnnnnnnnnnnnnnnnnnnnnnnnnnnnnnnnnnnnnnnnnnnnnnnnnnnnnnnnnnnnnnnnnnnnnnnnnnnnnnnnnnnnnnnnnnnnnnnnnnnnnnnnnnnnnnnnnnnnnnnnnnnnnnnnnnnnnnnnnnnnnnnnnnnnnnnnnnnnnnnnnnnnnnnnnnnnnnnnnnnnnnnnnnnnnnnnnnnnnnnnnnnnnnnnnnnnnnnnnnnnnnnnnnnnnnnnnnnnnnnnnnnnnnnnnnnnnnnnnnnnnnnnnnnnnnnnnnnnnnnnnnnnnnnnnnnnnnnnnnnnnnnnnnnnnnnnnnnnnnnnnnnnnnnnnnnnnnnnnnnnnnnnnnnnnnnnnnnnnnnnnnnnnnnnnnnnnnnnnnnnnnnnnnnnnnnnnnnnnnnnnnnnnnnnnnnnnnnnnnnnnnnnnnnnnnnnnnnnnnnnnnnnnnnnnnnnnnnnnnnnnnnnnnnnnnnnnnnnnnnnnnnnnnnnnnnnnnnnnnnnnnnnnnnnnnnnnnnnnnnnnnnnnnnnnnnnnnnnnnnnnnnnnnnnnnnnnnnnnnnnnnnnnnnnnnnnnnnnnnnnnnnnnnnnnnnnnnnnnnnnnnnnnnnnnnnnnnnnnnnnnnnnnnnnnnnnnnnnnnnnnnnnnnnnnnnnnnnnnnnnnnnnnnnnnnnnnnnnnnnnnnnnnnnnnnnnnnnnnnnnnnnnnnnnnnnnnnnnnnnnnnnnnnnnnnnnnnnnnnnnnnnnnnnnnnnnnnnnnnnnnnnnnnnnnnnnnnnnnnnnnnnnnnnnnnnnnnnnnnnnnnnnnnnnnnnnnnnnnnnnnnnnnnnnnnnnnnnnnnnnnnnnnnnnnnnnnnnnnnnnnnnnnnnnnnnnnnnnnnnnnnnnnnnnnnnnnnnnnnnnnnnnnnnnnnnnnnnnnnnnnnnnnnnnnnnnnnnnnnnnnnnnnnnnnnnnnnnnnnnnnnnnnnnnnnnnnnnnnnnnnnnnnnnnnnnnnnnnnnnnnnnnnnnnnnnnnnnnnnnnnnnnnnnnnnnnnnnnnnnnnnnnnnnnnnnnnnnnnnnnnnnnnnnnnnnnnnnnnnnnnnnnnnnnnnnnnnnnnnnnnnnnnnnnnnnnnnnnnnnnnnnnnnnnnnnnnnnnnnnnnnnnnnnnnnnnnnnnnnnnnnnnnnnnnnnnnnnnnnnnnnnnnnnnnnnnnnnnnnnnnnnnnnnnnnnnnnnnnnnnnnnnnnnnnnnnnnnnnnnnnnnnnnnnnnnnnnnnnnnnnnnnnnnnnnnnnnnnnnnnnnnnnnnnnnnnnnnnnnnnnnnnnnnnnnnnnnnnnnnnnnnnnnnnnnnnnnnnnnnnnnnnnnnnnnnnnnnnnnnnnnnnnnnnnnnnnnnnnnnnnnnnnnnnnnnnnnnnnnnnnnnnnnnnnnnnnnnnnnnnnnnnnnnnnnnnnnnnnnnnnnnnnnnnnnnnnnnnnnnnnnnnnnnnnnnnnnnnnnnnnnnnnnnnnnnnnnnnnnnnnnnnnnnnnnnnnnnnnnnnnnnnnnnnnnnnnnnnnnnnnnnnnnnnnnnnnnnnnnnnnnnnnnnnnnnnnnnnnnnnnnnnnnnnnnnnnnnnnnnnnnnnnnnnnnnnnnnnnnnnnnnnnnnnnnnnnnnnnnnnnnnnnnnnnnnnnnnnnnnnnnnnnnnnnnnnnnnnnnnnnnnnnnnnnnnnnnnnnnnnnnnnnnnnnnnnnnnnnnnnnnnnnnnnnnnnnnnnnnnnnnnnnnnnnnnnnnnnnnnnnnnnnnnnnnnnnnnnnnnnnnnnnnnnnnnnnnnnnnnnnnnnnnnnnnnnnnnnnnnnnnnnnnnnnnnnnnnnnnnnnnnnnnnnnnnnnnnnnnnnnnnnnnnnnnnnnnnnnnnnnnnnnnnnnnnnnnnnnnnnnnnnnnnnnnnnnnnnnnnnnnnnnnnnnnnnnnnnnnnnnnnnnnnnnnnnnnnnnnnnnnnnnnnnnnnnnnnnnnnnnnnnnnnnnnnnnnnnnnnnnnnnnnnnnnnnnnnnnnnnnnnnnnnnnnnnnnnnnnnnnnnnnnnnnnnnnnnnnnnnnnnnnnnnnnnnnnnnnnnnnnnnnnnnnnnnnnnnnnnnnnnnnnnnnnnnnnnnnnnnnnnnnnnnnnnnnnnnnnnnnnnnnnnnnnnnnnnnnnnnnnnnnnnnnnnnnnnnnnnnnnnnnnnnnnnnnnnnnnnnnnnnnnnnnnnnnnnnnnnnnnnnnnnnnnnnnnnnnnnnnnnnnnnnnnnnnnnnnnnnnnnnnnnnnnnnnnnnnnnnnnnnnnnnnnnnnnnnnnnnnnnnnnnnnnnnnnnnnnnnnnnnnnnnnnnnnnnnnnnnnnnnnnnnnnnnnnnnnnnnnnnnnnnnnnnnnnnnnnnnnnnnnnnnnnnnnnnnnnnnnnnnnnnnnnnnnnnnnnnnnnnnnnnnnnnnnnnnnnnnnnnnnnnnnnnnnnnnnnnnnnnnnnnnnnnnnnnnnnnnnnnnnnnnnnnnnnnnnnnnnnnnnnnnnnnnnnnnnnnnnnnnnnnnnnnnnnnnnnnnnnnnnnnnnnnnnnnnnnnnnnnnnnnnnnnnnnnnnnnnnnnnnnnnnnnnnnnnnnnnnnnnnnnnnnnnnnnnnnnnnnnnnnnnnnnnnnnnnnnnnnnnnnnnnnnnnnnnnnnnnnnnnnnnnnnnnnnnnnnnnnnnnnnnnnnnnnnnnnnnnnnnnnnnnnnnnnnnnnnnnnnnnnnnnnnnnnnnnnnnnnnnnnnnnnnnnnnnnnnnnnnnnnnnnnnnnnnnnnnnnnnnnnnnnnnnnnnnnnnnnnnnnnnnnnnnnnnnnnnnnnnnnnnnnnnnnnnnnnnnnnnnnnnnnnnnnnnnnnnnnnnnnnnnnnnnnnnnnnnnnnnnnnnnnnnnnnnnnnnnnnnnnnnnnnnnnnnnnnnnnnnnnnnnnnnnnnnnnnnnnnnnnnnnnnnnnnnnnnnnnnnnnnnnnnnnnnnnnnnnnnnnnnnnnnnnnnnnnnnnnnnnnnnnnnnnnnnnnnnnnnnnnnnnnnnnnnnnnnnnnnnnnnnnnnnnnnnnnnnnnnnnnnnnnnnnnnnnnnnnnnnnnnnnnnnnnnnnnnnnnnnnnnnnnnnnnnnnnnnnnnnnnnnnnnnnnnnnnnnnnnnnnnnnnnnnnnnnnnnnnnnnnnnnnnnnnnnnnnnnnnnnnnnnnnnnnnnnnnnnnnnnnnnnnnnnnnnnnnnnnnnnnnnnnnnnnnnnnnnnnnnnnnnnnnnnnnnnnnnnnnnnnnnnnnnnnnnnnnnnnnnnnnnnnnnnnnnnnnnnnnnnnnnnnnnnnnnnnnnnnnnnnnnnnnnnnnnnnnnnnnnnnnnnnnnnnnnnnnnnnnnnnnnnnnnnnnnnnnnnnnnnnnnnnnnnnnnnnnnnnnnnnnnnnnnnnnnnnnnnnnnnnnnnnnnnnnnnnnnnnnnnnnnnnnnnnnnnnnnnnnnnnnnnnnnnnnnnnnnnnnnnnnnnnnnnnnnnnnnnnnnnnnnnnnnnnnnnnnnnnnnnnnnnnnnnnnnnnnnnnnnnnnnnnnnnnnnnnnnnnnnnnnnnnnnnnnnnnnnnnnnnnnnnnnnnnnnnnnnnnnnnnnnnnnnnnnnnnnnnnnnnnnnnnnnnnnnnnnnnnnnnnnnnnnnnnnnnnnnnnnnnnnnnnnnnnnnnnnnnnnnnnnnnnnnnnnnnnnnnnnnnnnnnnnnnnnnnnnnnnnnnnnnnnnnnnnnnnnnnnnnnnnnnnnnnnnnnnnnnnnnnnnnnnnnnnnnnnnnnnnnnnnnnnnnnnnnnnnnnnnnnnnnnnnnnnnnnnnnnnnnnnnnnnnnnnnnnnnnnnnnnnnnnnnnnnnnnnnnnnnnnnnnnnnnnnnnnnnnnnnnnnnnnnnnnnnnnnnnnnnnnnnnnnnnnnnnnnnnnnnnnnnnnnnnnnnnnnnnnnnnnnnnnnnnnnnnnnnnnnnnnnnnnnnnnnnnnnnnnnnnnnnnnnnnnnnnnnnnnnnnnnnnnnnnnnnnnnnnnnnnnnnnnnnnnnnnnnnnnnnnnnnnnnnnnnnnnnnnnnnnnnnnnnnnnnnnnnnnnnnnnnnnnnnnnnnnnnnnnnnnnnnnnnnnnnnnnnnnnnnnnnnnnnnnnnnnnnnnnnnnnnnnnnnnnnnnnnnnnnnnnnnnnnnnnnnnnnnnnnnnnnnnnnnnnnnnnnnnnnnnnnnnnnnnnnnnnnnnnnnnnnnnnnnnnnnnnnnnnnnnnnnnnnnnnnnnnnnnnnnnnnnnnnnnnnnnnnnnnnnnnnnnnnnnnnnnnnnnnnnnnnnnnnnnnnnnnnnnnnnnnnnnnnnnnnnnnnnnnnnnnnnnnnnnnnnnnnnnnnnnnnnnnnnnnnnnnnnnnnnnnnnnnnnnnnnnnnnnnnnnnnnnnnnnnnnnnnnnnnnnnnnnnnnnnnnnnnnnnnnnnnnnnnnnnnnnnnnnnnnnnnnnnnnnnnnnnnnnnnnnnnnnnnnnnnnnnnnnnnnnnnnnnnnnnnnnnnnnnnnnnnnnnnnnnnnnnnnnnnnnnnnnnnnnnnnnnnnnnnnnnnnnnnnnnnnnnnnnnnnnnnnnnnnnnnnnnnnnnnnnnnnnnnnnnnnnnnnnnnnnnnnnnnnnnnnnnnnnnnnnnnnnnnnnnnnnnnnnnnnnnnnnnnnnnnnnnnnnnnnnnnnnnnnnnnnnnnnnnnnnnnnnnnnnnnnnnnnnnnnnnnnnnnnnnnnnnnnnnnnnnnnnnnnnnnnnnnnnnnnnnnnnnnnnnnnnnnnnnnnnnnnnnnnnnnnnnnnnnnnnnnnnnnnnnnnnnnnnnnnnnnnnnnnnnnnnnnnnnnnnnnnnnnnnnnnnnnnnnnnnnnnnnnnnnnnnnnnnnnnnnnnnnnnnnnnnnnnnnnnnnnnnnnnnnnnnnnnnnnnnnnnnnnnnnnnnnnnnnnnnnnnnnnnnnnnnnnnnnnnnnnnnnnnnnnnnnnnnnnnnnnnnnnnnnnnnnnnnnnnnnnnnnnnnnnnnnnnnnnnnnnnnnnnnnnnnnnnnnnnnnnnnnnnnnnnnnnnnnnnnnnnnnnnnnnnnnnnnnnnnnnnnnnnnnnnnnnnnnnnnnnnnnnnnnnnnnnnnnnnnnnnnnnnnnnnnnnnnnnnnnnnnnnnnnnnnnnnnnnnnnnnnnnnnnnnnnnnnnnnnnnnnnnnnnnnnnnnnnnnnnnnnnnnnnnnnnnnnnnnnnnnnnnnnnnnnnnnnnnnnnnnnnnnnnnnnnnnnnnnnnnnnnnnnnnnnnnnnnnnnnnnnnnnnnnnnnnnnnnnnnnnnnnnnnnnnnnnnnnnnnnnnnnnnnnnnnnnnnnnnnnnnnnnnnnnnnnnnnnnnnnnnnnnnnnnnnnnnnnnnnnnnnnnnnnnnnnnnnnnnnnnnnnnnnnnnnnnnnnnnnnnnnnnnnnnnnnnnnnnnnnnnnnnnnnnnnnnnnnnnnnnnnnnnnnnnnnnnnnnnnnnnnnnnnnnnnnnnnnnnnnnnnnnnnnnnnnnnnnnnnnnnnnnnnnnnnnnnnnnnnnnnnnnnnnnnnnnnnnnnnnnnnnnnnnnnnnnnnnnnnnnnnnnnnnnnnnnnnnnnnnnnnnnnnnnnnnnnnnnnnnnnnnnnnnnnnnnnnnnnnnnnnnnnnnnnnnnnnnnnnnnnnnnnnnnnnnnnnnnnnnnnnnnnnnnnnnnnnnnnnnnnnnnnnnnnnnnnnnnnnnnnnnnnnnnnnnnnnnnnnnnnnnnnnnnnnnnnnnnnnnnnnnnnnnnnnnnnnnnnnnnnnnnnnnnnnnnnnnnnnnnnnnnnnnnnnnnnnnnnnnnnnnnnnnnnnnnnnnnnnnnnnnnnnnnnnnnnnnnnnnnnnnnnnnnnnnnnnnnnnnnnnnnnnnnnnnnnnnnnnnnnnnnnnnnnnnnnnnnnnnnnnnnnnnnnnnnnnnnnnnnnnnnnnnnnnnnnnnnnnnnnnnnnnnnnnnnnnnnnnnnnnnnnnnnnnnnnnnnnnnnnnnnnnnnnnnnnnnnnnnnnnnnnnnnnnnnnnnnnnnnnnnnnnnnnnnnnnnnnnnnnnnnnnnnnnnnnnnnnnnnnnnnnnnnnnnnnnnnnnnnnnnnnnnnnnnnnnnnnnnnnnnnnnnnnnnnnnnnnnnnnnnnnnnnnnnnnnnnnnnnnnnnnnnnnnnnnnnnnnnnnnnnnnnnnnnnnnnnnnnnnnnnnnnnnnnnnnnnnnnnnnnnnnnnnnnnnnnnnnnnnnnnnnnnnnnnnnnnnnnnnnnnnnnnnnnnnnnnnnnnnnnnnnnnnnnnnnnnnnnnnnnnnnnnnnnnnnnnnnnnnnnnnnnnnnnnnnnnnnnnnnnnnnnnnnnnnnnnnnnnnnnnnnnnnnnnnnnnnnnnnnnnnnnnnnnnnnnnnnnnnnnnnnnnnnnnnnnnnnnnnnnnnnnnnnnnnnnnnnnnnnnnnnnnnnnnnnnnnnnnnnnnnnnnnnnnnnnnnnnnnnnnnnnnnnnnnnnnnnnnnnnnnnnnnnnnnnnnnnnnnnnnnnnnnnnnnnnnnnnnnnnnnnnnnnnnnnnnnnnnnnnnnnnnnnnnnnnnnnnnnnnnnnnnnnnnnnnnnnnnnnnnnnnnnnnnnnnnnnnnnnnnnnnnnnnnnnnnnnnnnnnnnnnnnnnnnnnnnnnnnnnnnnnnnnnnnnnnnnnnnnnnnnnnnnnnnnnnnnnnnnnnnnnnnnnnnnnnnnnnnnnnnnnnnnnnnnnnnnnnnnnnnnnnnnnnnnnnnnnnnnnnnnnnnnnnnnnnnnnnnnnnnnnnnnnnnnnnnnnnnnnnnnnnnnnnnnnnnnnnnnnnnnnnnnnnnnnnnnnnnnnnnnnnnnnnnnnnnnnnnnnnnnnnnnnnnnnnnnnnnnnnnnnnnnnnnnnnnnnnnnnnnnnnnnnnnnnnnnnnnnnnnnnnnnnnnnnnnnnnnnnnnnnnnnnnnnnnnnnnnnnnnnnnnnnnnnnnnnnnnnnnnnnnnnnnnnnnnnnnnnnnnnnnnnnnnnnnnnnnnnnnnnnnnnnnnnnnnnnnnnnnnnnnnnnnnnnnnnnnnnnnnnnnnnnnnnnnnnnnnnnnnnnnnnnnnnnnnnnnnnnnnnnnnnnnnnnnnnnnnnnnnnnnnnnnnnnnnnnnnnnnnnnnnnnnnnnnnnnnnnnnnnnnnnnnnnnnnnnnnnnnnnnnnnnnnnnnnnnnnnnnnnnnnnnnnnnnnnnnnnnnnnnnnnnnnnnnnnnnnnnnnnnnnnnnnnnnnnnnnnnnnnnnnnnnnnnnnnnnnnnnnnnnnnnnnnnnnnnnnnnnnnnnnnnnnnnnnnnnnnnnnnnnnnnnnnnnnnnnnnnnnnnnnnnnnnnnnnnnnnnnnnnnnnnnnnnnnnnnnnnnnnnnnnnnnnnnnnnnnnnnnnnnnnnnnnnnnnnnnnnnnnnnnnnnnnnnnnnnnnnnnnnnnnnnnnnnnnnnnnnnnnnnnnnnnnnnnnnnnnnnnnnnnnnnnnnnnnnnnnnnnnnnnnnnnnnnnnnnnnnnnnnnnnnnnnnnnnnnnnnnnnnnnnnnnnnnnnnnnnnnnnnnnnnnnnnnnnnnnnnnnnnnnnnnnnnnnnnnnnnnnnnnnnnnnnnnnnnnnnnnnnnnnnnnnnnnnnnnnnnnnnnnnnnnnnnnnnnnnnnnnnnnnnnnnnnnnnnnnnnnnnnnnnnnnnnnnnnnnnnnnnnnnnnnnnnnnnnnnnnnnnnnnnnnnnnnnnnnnnnnnnnnnnnnnnnnnnnnnnnnnnnnnnnnnnnnnnnnnnnnnnnnnnnnnnnnnnnnnnnnnnnnnnnnnnnnnnnnnnnnnnnnnnnnnnnnnnnnnnnnnnnnnnnnnnnnnnnnnnnnnnnnnnnnnnnnnnnnnnnnnnnnnnnnnnnnnnnnnnnnnnnnnnnnnnnnnnnnnnnnnnnnnnnnnnnnnnnnnnnnnnnnnnnnnnnnnnnnnnnnnnnnnnnnnnnnnnnnnnnnnnnnnnnnnnnnnnnnnnnnnnnnnnnnnnnnnnnnnnnnnnnnnnnnnnnnnnnnnnnnnnnnnnnnnnnnnnnnnnnnnnnnnnnnnnnnnnnnnnnnnnnnnnnnnnnnnnnnnnnnnnnnnnnnnnnnnnnnnnnnnnnnnnnnnnnnnnnnnnnnnnnnnnnnnnnnnnnnnnnnnnnnnnnnnnnnnnnnnnnnnnnnnnnnnnnnnnnnnnnnnnnnnnnnnnnnnnnnnnnnnnnnnnnnnnnnnnnnnnnnnnnnnnnnnnnnnnnnnnnnnnnnnnnnnnnnnnnnnnnnnnnnnnnnnnnnnnnnnnnnnnnnnnnnnnnnnnnnnnnnnnnnnnnnnnnnnnnnnnnnnnnnnnnnnnnnnnnnnnnnnnnnnnnnnnnnnnnnnnnnnnnnnnnnnnnnnnnnnnnnnnnnnnnnnnnnnnnnnnnnnnnnnnnnnnnnnnnnnnnnnnnnnnnnnnnnnnnnnnnnnnnnnnnnnnnnnnnnnnnnnnnnnnnnnnnnnnnnnnnnnnnnnnnnnnnnnnnnnnnnnnnnnnnnnnnnnnnnnnnnnnnnnnnnnnnnnnnnnnnnnnnnnnnnnnnnnnnnnnnnnnnnnnnnnnnnnnnnnnnnnnnnnnnnnnnnnnnnnnnnnnnnnnnnnnnnnnnnnnnnnnnnnnnnnnnnnnnnnnnnnnnnnnnnnnnnnnnnnnnnnnnnnnnnnnnnnnnnnnnnnnnnnnnnnnnnnnnnnnnnnnnnnnnnnnnnnnnnnnnnnnnnnnnnnnnnnnnnnnnnnnnnnnnnnnnnnnnnnnnnnnnnnnnnnnnnnnnnnnnnnnnnnnnnnnnnnnnnnnnnnnnnnnnnnnnnnnnnnnnnnnnnnnnnnnnnnnnnnnnnnnnnnnnnnnnnnnnnnnnnnnnnnnnnnnnnnnnnnnnnnnnnnnnnnnnnnnnnnnnnnnnnnnnnnnnnnnnnnnnnnnnnnnnnnnnnnnnnnnnnnnnnnnnnnnnnnnnnnnnnnnnnnnnnnnnnnnnnnnnnnnnnnnnnnnnnnnnnnnnnnnnnnnnnnnnnnnnnnnnnnnnnnnnnnnnnnnnnnnnnnnnnnnnnnnnnnnnnnnnnnnnnnnnnnnnnnnnnnnnnnnnnnnnnnnnnnnnnnnnnnnnnnnnnnnnnnnnnnnnnnnnnnnnnnnnnnnnnnnnnnnnnnnnnnnnnnnnnnnnnnnnnnnnnnnnnnnnnnnnnnnnnnnnnnnnnnnnnnnnnnnnnnnnnnnnnnnnnnnnnnnnnnnnnnnnnnnnnnnnnnnnnnnnnnnnnnnnnnnnnnnnnnnnnnnnnnnnnnnnnnnnnnnnnnnnnnnnnnnnnnnnnnnnnnnnnnnnnnnnnnnnnnnnnnnnnnnnnnnnnnnnnnnnnnnnnnnnnnnnnnnnnnnnnnnnnnnnnnnnnnnnnnnnnnnnnnnnnnnnnnnnnnnnnnnnnnnnnnnnnnnnnnnnnnnnnnnnnnnnnnnnnnnnnnnnnnnnnnnnnnnnnnnnnnnnnnnnnnnnnnnnnnnnnnnnnnnnnnnnnnnnnnnnnnnnnnnnnnnnnnnnnnnnnnnnnnnnnnnnnnnnnnnnnnnnnnnnnnnnnnnnnnnnnnnnnnnnnnnnnnnnnnnnnnnnnnnnnnnnnnnnnnnnnnnnnnnnnnnnnnnnnnnnnnnnnnnnnnnnnnnnnnnnnnnnnnnnnnnnnnnnnnnnnnnnnnnnnnnnnnnnnnnnnnnnnnnnnnnnnnnnnnnnnnnnnnnnnnnnnnnnnnnnnnnnnnnnnnnnnnnnnnnnnnnnnnnnnnnnnnnnnnnnnnnnnnnnnnnnnnnnnnnnnnnnnnnnnnnnnnnnnnnnnnnnnnnnnnnnnnnnnnnnnnnnnnnnnnnnnnnnnnnnnnnnnnnnnnnnnnnnnnnnnnnnnnnnnnnnnnnnnnnnnnnnnnnnnnnnnnnnnnnnnnnnnnnnnnnnnnnnnnnnnnnnnnnnnnnnnnnnnnnnnnnnnnnnnnnnnnnnnnnnnnnnnnnnnnnnnnnnnnnnnnnnnnnnnnnnnnnnnnnnnnnnnnnnnnnnnnnnnnnnnnnnnnnnnnnnnnnnnnnnnnnnnnnnnnnnnnnnnnnnnnnnnnnnnnnnnnnnnnnnnnnnnnnnnnnnnnnnnnnnnnnnnnnnnnnnnnnnnnnnnnnnnnnnnnnnnnnnnnnnnnnnnnnnnnnnnnnnnnnnnnnnnnnnnnnnnnnnnnnnnnnnnnnnnnnnnnnnnnnnnnnnnnnnnnnnnnnnnnnnnnnnnnnnnnnnnnnnnnnnnnnnnnnnnnnnnnnnnnnnnnnnnnnnnnnnnnnnnnnnnnnnnnnnnnnnnnnnnnnnnnnnnnnnnnnnnnnnnnnnnnnnnnnnnnnnnnnnnnnnnnnnnnnnnnnnnnnnnnnnnnnnnnnnnnnnnnnnnnnnnnnnnnnnnnnnnnnnnnnnnnnnnnnnnnnnnnnnnnnnnnnnnnnnnnnnnnnnnnnnnnnnnnnnnnnnnnnnnnnnnnnnnnnnnnnnnnnnnnnnnnnnnnnnnnnnnnnnnnnnnnnnnnnnnnnnnnnnnnnnnnnnnnnnnnnnnnnnnnnnnnnnnnnnnnnnnnnnnnnnnnnnnnnnnnnnnnnnnnnnnnnnnnnnnnnnnnnnnnnnnnnnnnnnnnnnnnnnnnnnnnnnnnnnnnnnnnnnnnnnnnnnnnnnnnnnnnnnnnnnnnnnnnnnnnnnnnnnnnnnnnnnnnnnnnnnnnnnnnnnnnnnnnnnnnnnnnnnnnnnnnnnnnnnnnnnnnnnnnnnnnnnnnnnnnnnnnnnnnnnnnnnnnnnnnnnnnnnnnnnnnnnnnnnnnnnnnnnnnnnnnnnnnnnnnnnnnnnnnnnnnnnnnnnnnnnnnnnnnnnnnnnnnnnnnnnnnnnnnnnnnnnnnnnnnnnnnnnnnnnnnnnnnnnnnnnnnnnnnnnnnnnnnnnnnnnnnnnnnnnnnnnnnnnnnnnnnnnnnnnnnnnnnnnnnnnnnnnnnnnnnnnnnnnnnnnnnnnnnnnnnnnnnnnnnnnnnnnnnnnnnnnnnnnnnnnnnnnnnnnnnnnnnnnnnnnnnnnnnnnnnnnnnnnnnnnnnnnnnnnnnnnnnnnnnnnnnnnnnnnnnnnnnnnnnnnnnnnnnnnnnnnnnnnnnnnnnnnnnnnnnnnnnnnnnnnnnnnnnnnnnnnnnnnnnnnnnnnnnnnnnnnnnnnnnnnnnnnnnnnnnnnnnnnnnnnnnnnnnnnnnnnnnnnnnnnnnnnnnnnnnnnnnnnnnnnnnnnnnnnnnnnnnnnnnnnnnnnnnnnnnnnnnnnnnnnnnnnnnnnnnnnnnnnnnnnnnnnnnnnnnnnnnnnnnnnnnnnnnnnnnnnnnnnnnnnnnnnnnnnnnnnnnnnnnnnnnnnnnnnnnnnnnnnnnnnnnnnnnnnnnnnnnnnnnnnnnnnnnnnnnnnnnnnnnnnnnnnnnnnnnnnnnnnnnnnnnnnnnnnnnnnnnnnnnnnnnnnnnnnnnnnnnnnnnnnnnnnnnnnnnnnnnnnnnnnnnnnnnnnnnnnnnnnnnnnnnnnnnnnnnnnnnnnnnnnnnnnnnnnnnnnnnnnnnnnnnnnnnnnnnnnnnnnnnnnnnnnnnnnnnnnnnnnnnnnnnnnnnnnnnnnnnnnnnnnnnnnnnnnnnnnnnnnnnnnnnnnnnnnnnnnnnnnnnnnnnnnnnnnnnnnnnnnnnnnnnnnnnnnnnnnnnnnnnnnnnnnnnnnnnnnnnnnnnnnnnnnnnnnnnnnnnnnnnnnnnnnnnnnnnnnnnnnnnnnnnnnnnnnnnnnnnnnnnnnnnnnnnnnnnnnnnnnnnnnnnnnnnnnnnnnnnnnnnnnnnnnnnnnnnnnnnnnnnnnnnnnnnnnnnnnnnnnnnnnnnnnnnnnnnnnnnnnnnnnnnnnnnnnnnnnnnnnnnnnnnnnnnnnnnnnnnnnnnnnnnnnnnnnnnnnnnnnnnnnnnnnnnnnnnnnnnnnnnnnnnnnnnnnnnnnnnnnnnnnnnnnnnnnnnnnnnnnnnnnnnnnnnnnnnnnnnnnnnnnnnnnnnnnnnnnnnnnnnnnnnnnnnnnnnnnnnnnnnnnnnnnnnnnnnnnnnnnnnnnnnnnnnnnnnnnnnnnnnnnnnnnnnnnnnnnnnnnnnnnnnnnnnnnnnnnnnnnnnnnnnnnnnnnnnnnnnnnnnnnnnnnnnnnnnnnnnnnnnnnnnnnnnnnnnnnnnnnnnnnnnnnnnnnnnnnnnnnnnnnnnnnnnnnnnnnnnnnnnnnnnnnnnnnnnnnnnnnnnnnnnnnnnnnnnnnnnnnnnnnnnnnnnnnnnnnnnnnnnnnnnnnnnnnnnnnnnnnnnnnnnnnnnnnnnnnnnnnnnnnnnnnnnnnnnnnnnnnnnnnnnnnnnnnnnnnnnnnnnnnnnnnnnnnnnnnnnnnnnnnnnnnnnnnnnnnnnnnnnnnnnnnnnnnnnnnnnnnnnnnnnnnnnnnnnnnnnnnnnnnnnnnnnnnnnnnnnnnnnnnnnnnnnnnnnnnnnnnnnnnnnnnnnnnnnnnnnnnnnnnnnnnnnnnnnnnnnnnnnnnnnnnnnnnnnnnnnnnnnnnnnnnnnnnnnnnnnnnnnnnnnnnnnnnnnnnnnnnnnnnnnnnnnnnnnnnnnnnnnnnnnnnnnnnnnnnnnnnnnnnnnnnnnnnnnnnnnnnnnnnnnnnnnnnnnnnnnnnnnnnnnnnnnnnnnnnnnnnnnnnnnnnnnnnnnnnnnnnnnnnnnnnnnnnnnnnnnnnnnnnnnnnnnnnnnnnnnnnnnnnnnnnnnnnnnnnnnnnnnnnnnnnnnnnnnnnnnnnnnnnnnnnnnnnnnnnnnnnnnnnnnnnnnnnnnnnnnnnnnnnnnnnnnnnnnnnnnnnnnnnnnnnnnnnnnnnnnnnnnnnnnnnnnnnnnnnnnnnnnnnnnnnnnnnnnnnnnnnnnnnnnnnnnnnnnnnnnnnnnnnnnnnnnnnnnnnnnnnnnnnnnnnnnnnnnnnnnnnnnnnnnnnnnnnnnnnnnnnnnnnnnnnnnnnnnnnnnnnnnnnnnnnnnnnnnnnnnnnnnnnnnnnnnnnnnnnnnnnnnnnnnnnnnnnnnnnnnnnnnnnnnnnnnnnnnnnnnnnnnnnnnnnnnnnnnnnnnnnnnnnnnnnnnnnnnnnnnnnnnnnnnnnnnnnnnnnnnnnnnnnnnnnnnnnnnnnnnnnnnnnnnnnnnnnnnnnnnnnnnnnnnnnnnnnnnnnnnnnnnnnnnnnnnnnnnnnnnnnnnnnnnnnnnnnnnnnnnnnnnnnnnnnnnnnnnnnnnnnnnnnnnnnnnnnnnnnnnnnnnnnnnnnnnnnnnnnnnnnnnnnnnnnnnnnnnnnnnnnnnnnnnnnnnnnnnnnnnnnnnnnnnnnnnnnnnnnnnnnnnnnnnnnnnnnnnnnnnnnnnnnnnnnnnnnnnnnnnnnnnnnnnnnnnnnnnnnnnnnnnnnnnnnnnnnnnnnnnnnnnnnnnnnnnnnnnnnnnnnnnnnnnnnnnnnnnnnnnnnnnnnnnnnnnnnnnnnnnnnnnnnnnnnnnnnnnnnnnnnnnnnnnnnnnnnnnnnnnnnnnnnnnnnnnnnnnnnnnnnnnnnnnnnnnnnnnnnnnnnnnnnnnnnnnnnnnnnnnnnnnnnnnnnnnnnnnnnnnnnnnnnnnnnnnnnnnnnnnnnnnnnnnnnnnnnnnnnnnnnnnnnnnnnnnnnnnnnnnnnnnnnnnnnnnnnnnnnnnnnnnnnnnnnnnnnnnnnnnnnnnnnnnnnnnnnnnnnnnnnnnnnnnnnnnnnnnnnnnnnnnnnnnnnnnnnnnnnnnnnnnnnnnnnnnnnnnnnnnnnnnnnnnnnnnnnnnnnnnnnnnnnnnnnnnnnnnnnnnnnnnnnnnnnnnnnnnnnnnnnnnnnnnnnnnnnnnnnnnnnnnnnnnnnnnnnnnnnnnnnnnnnnnnnnnnnnnnnnnnnnnnnnnnnnnnnnnnnnnnnnnnnnnnnnnnnnnnnnnnnnnnnnnnnnnnnnnnnnnnnnnnnnnnnnnnnnnnnnnnnnnnnnnnnnnnnnnnnnnnnnnnnnnnnnnnnnnnnnnnnnnnnnnnnnnnnnnnnnnnnnnnnnnnnnnnnnnnnnnnnnnnnnnnnnnnnnnnnnnnnnnnnnnnnnnnnnnnnnnnnnnnnnnnnnnnnnnnnnnnnnnnnnnnnnnnnnnnnnnnnnnnnnnnnnnnnnnnnnnnnnnnnnnnnnnnnnnnnnnnnnnnnnnnnnnnnnnnnnnnnnnnnnnnnnnnnnnnnnnnnnnnnnnnnnnnnnnnnnnnnnnnnnnnnnnnnnnnnnnnnnnnnnnnnnnnnnnnnnnnnnnnnnnnnnnnnnnnnnnnnnnnnnnnnnnnnnnnnnnnnnnnnnnnnnnnnnnnnnnnnnnnnnnnnnnnnnnnnnnnnnnnnnnnnnnnnnnnnnnnnnnnnnnnnnnnnnnnnnnnnnnnnnnnnnnnnnnnnnnnnnnnnnnnnnnnnnnnnnnnnnnnnnnnnnnnnnnnnnnnnnnnnnnnnnnnnnnnnnnnnnnnnnnnnnnnnnnnnnnnnnnnnnnnnnnnnnnnnnnnnnnnnnnnnnnnnnnnnnnnnnnnnnnnnnnnnnnnnnnnnnnnnnnnnnnnnnnnnnnnnnnnnnnnnnnnnnnnnnnnnnnnnnnnnnnnnnnnnnnnnnnnnnnnnnnnnnnnnnnnnnnnnnnnnnnnnnnnnnnnnnnnnnnnnnnnnnnnnnnnnnnnnnnnnnnnnnnnnnnnnnnnnnnnnnnnnnnnnnnnnnnnnnnnnnnnnnnnnnnnnnnnnnnnnnnnnnnnnnnnnnnnnnnnnnnnnnnnnnnnnnnnnnnnnnnnnnnnnnnnnnnnnnnnnnnnnnnnnnnnnnnnnnnnnnnnnnnnnnnnnnnnnnnnnnnnnnnnnnnnnnnnnnnnnnnnnnnnnnnnnnnnnnnnnnnnnnnnnnnnnnnnnnnnnnnnnnnnnnnnnnnnnnnnnnnnnnnnnnnnnnnnnnnnnnnnnnnnnnnnnnnnnnnnnnnnnnnnnnnnnnnnnnnnnnnnnnnnnnnnnnnnnnnnnnnnnnnnnnnnnnnnnnnnnnnnnnnnnnnnnnnnnnnnnnnnnnnnnnnnnnnnnnnnnnnnnnnnnnnnnnnnnnnnnnnnnnnnnnnnnnnnnnnnnnnnnnnnnnnnnnnnnnnnnnnnnnnnnnnnnnnnnnnnnnnnnnnnnnnnnnnnnnnnnnnnnnnnnnnnnnnnnnnnnnnnnnnnnnnnnnnnnnnnnnnnnnnnnnnnnnnnnnnnnnnnnnnnnnnnnnnnnnnnnnnnnnnnnnnnnnnnnnnnnnnnnnnnnnnnnnnnnnnnnnnnnnnnnnnnnnnnnnnnnnnnnnnnnnnnnnnnnnnnnnnnnnnnnnnnnnnnnnnnnnnnnnnnnnnnnnnnnnnnnnnnnnnnnnnnnnnnnnnnnnnnnnnnnnnnnnnnnnnnnnnnnnnnnnnnnnnnnnnnnnnnnnnnnnnnnnnnnnnnnnnnnnnnnnnnnnnnnnnnnnnnnnnnnnnnnnnnnnnnnnnnnnnnnnnnnnnnnnnnnnnnnnnnnnnnnnnnnnnnnnnnnnnnnnnnnnnnnnnnnnnnnnnnnnnnnnnnnnnnnnnnnnnnnnnnnnnnnnnnnnnnnnnnnnnnnnnnnnnnnnnnnnnnnnnnnnnnnnnnnnnnnnnnnnnnnnnnnnnnnnnnnnnnnnnnnnnnnnnnnnnnnnnnnnnnnnnnnnnnnnnnnnnnnnnnnnnnnnnnnnnnnnnnnnnnnnnnnnnnnnnnnnnnnnnnnnnnnnnnnnnnnnnnnnnnnnnnnnnnnnnnnnnnnnnnnnnnnnnnnnnnnnnnnnnnnnnnnnnnnnnnnnnnnnnnnnnnnnnnnnnnnnnnnnnnnnnnnnnnnnnnnnnnnnnnnnnnnnnnnnnnnnnnnnnnnnnnnnnnnnnnnnnnnnnnnnnnnnnnnnnnnnnnnnnnnnnnnnnnnnnnnnnnnnnnnnnnnnnnnnnnnnnnnnnnnnnnnnnnnnnnnnnnnnnnnnnnnnnnnnnnnnnnnnnnnnnnnnnnnnnnnnnnnnnnnnnnnnnnnnnnnnnnnnnnnnnnnnnnnnnnnnnnnnnnnnnnnnnnnnnnnnnnnnnnnnnnnnnnnnnnnnnnnnnnnnnnnnnnnnnnnnnnnnnnnnnnnnnnnnnnnnnnnnnnnnnnnnnnnnnnnnnnnnnnnnnnnnnnnnnnnnnnnnnnnnnnnnnnnnnnnnnnnnnnnnnnnnnnnnnnnnnnnnnnnnnnnnnnnnnnnnnnnnnnnnnnnnnnnnnnnnnnnnnnnnnnnnnnnnnnnnnnnnnnnnnnnnnnnnnnnnnnnnnnnnnnnnnnnnnnnnnnnnnnnnnnnnnnnnnnnnnnnnnnnnnnnnnnnnnnnnnnnnnnnnnnnnnnnnnnnnnnnnnnnnnnnnnnnnnnnnnnnnnnnnnnnnnnnnnnnnnnnnnnnnnnnnnnnnnnnnnnnnnnnnnnnnnnnnnnnnnnnnnnnnnnnnnnnnnnnnnnnnnnnnnnnnnnnnnnnnnnnnnnnnnnnnnnnnnnnnnnnnnnnnnnnnnnnnnnnnnnnnnnnnnnnnnnnnnnnnnnnnnnnnnnnnnnnnnnnnnnnnnnnnnnnnnnnnnnnnnnnnnnnnnnnnnnnnnnnnnnnnnnnnnnnnnnnnnnnnnnnnnnnnnnnnnnnnnnnnnnnnnnnnnnnnnnnnnnnnnnnnnnnnnnnnnnnnnnnnnnnnnnnnnnnnnnnnnnnnnnnnnnnnnnnnnnnnnnnnnnnnnnnnnnnnnnnnnnnnnnnnnnnnnnnnnnnnnnnnnnnnnnnnnnnnnnnnnnnnnnnnnnnnnnnnnnnnnnnnnnnnnnnnnnnnnnnnnnnnnnnnnnnnnnnnnnnnnnnnnnnnnnnnnnnnnnnnnnnnnnnnnnnnnnnnnnnnnnnnnnnnnnnnnnnnnnnnnnnnnnnnnnnnnnnnnnnnnnnnnnnnnnnnnnnnnnnnnnnnnnnnnnnnnnnnnnnnnnnnnnnnnnnnnnnnnnnnnnnnnnnnnnnnnnnnnnnnnnnnnnnnnnnnnnnnnnnnnnnnnnnnnnnnnnnnnnnnnnnnnnnnnnnnnnnnnnnnnnnnnnnnnnnnnnnnnnnnnnnnnnnnnnnnnnnnnnnnnnnnnnnnnnnnnnnnnnnnnnnnnnnnnnnnnnnnnnnnnnnnnnnnnnnnnnnnnnnnnnnnnnnnnnnnnnnnnnnnnnnnnnnnnnnnnnnnnnnnnnnnnnnnnnnnnnnnnnnnnnnnnnnnnnnnnnnnnnnnnnnnnnnnnnnnnnnnnnnnnnnnnnnnnnnnnnnnnnnnnnnnnnnnnnnnnnnnnnnnnnnnnnnnnnnnnnnnnnnnnnnnnnnnnnnnnnnnnnnnnnnnnnnnnnnnnnnnnnnnnnnnnnnnnnnnnnnnnnnnnnnnnnnnnnnnnnnnnnnnnnnnnnnnnnnnnnnnnnnnnnnnnnnnnnnnnnnnnnnnnnnnnnnnnnnnnnnnnnnnnnnnnnnnnnnnnnnnnnnnnnnnnnnnnnnnnnnnnnnnnnnnnnnnnnnnnnnnnnnnnnnnnnnnnnnnnnnnnnnnnnnnnnnnnnnnnnnnnnnnnnnnnnnnnnnnnnnnnnnnnnnnnnnnnnnnnnnnnnnnnnnnnnnnnnnnnnnnnnnnnnnnnnnnnnnnnnnnnnnnnnnnnnnnnnnnnnnnnnnnnnnnnnnnnnnnnnnnnnnnnnnnnnnnnnnnnnnnnnnnnnnnnnnnnnnnnnnnnnnnnnnnnnnnnnnnnnnnnnnnnnnnnnnnnnnnnnnnnnnnnnnnnnnnnnnnnnnnnnnnnnnnnnnnnnnnnnnnnnnnnnnnnnnnnnnnnnnnnnnnnnnnnnnnnnnnnnnnnnnnnnnnnnnnnnnnnnnnnnnnnnnnnnnnnnnnnnnnnnnnnnnnnnnnnnnnnnnnnnnnnnnnnnnnnnnnnnnnnnnnnnnnnnnnnnnnnnnnnnnnnnnnnnnnnnnnnnnnnnnnnnnnnnnnnnnnnnnnnnnnnnnnnnnnnnnnnnnnnnnnnnnnnnnnnnnnnnnnnnnnnnnnnnnnnnnnnnnnnnnnnnnnnnnnnnnnnnnnnnnnnnnnnnnnnnnnnnnnnnnnnnnnnnnnnnnnnnnnnnnnnnnnnnnnnnnnnnnnnnnnnnnnnnnnnnnnnnnnnnnnnnnnnnnnnnnnnnnnnnnnnnnnnnnnnnnnnnnnnnnnnnnnnnnnnnnnnnnnnnnnnnnnnnnnnnnnnnnnnnnnnnnnnnnnnnnnnnnnnnnnnnnnnnnnnnnnnnnnnnnnnnnnnnnnnnnnnnnnnnnnnnnnnnnnnnnnnnnnnnnnnnnnnnnnnnnnnnnnnnnnnnnnnnnnnnnnnnnnnnnnnnnnnnnnnnnnnnnnnnnnnnnnnnnnnnnnnnnnnnnnnnnnnnnnnnnnnnnnnnnnnnnnnnnnnnnnnnnnnnnnnnnnnnnnnnnnnnnnnnnnnnnnnnnnnnnnnnnnnnnnnnnnnnnnnnnnnnnnnnnnnnnnnnnnnnnnnnnnnnnnnnnnnnnnnnnnnnnnnnnnnnnnnnnnnnnnnnnnnnnnnnnnnnnnnnnnnnnnnnnnnnnnnnnnnnnnnnnnnnnnnnnnnnnnnnnnnnnnnnnnnnnnnnnnnnnnnnnnnnnnnnnnnnnnnnnnnnnnnnnnnnnnnnnnnnnnnnnnnnnnnnnnnnnnnnnnnnnnnnnnnnnnnnnnnnnnnnnnnnnnnnnnnnnnnnnnnnnnnnnnnnnnnnnnnnnnnnnnnnnnnnnnnnnnnnnnnnnnnnnnnnnnnnnnnnnnnnnnnnnnnnnnnnnnnnnnnnnnnnnnnnnnnnnnnnnnnnnnnnnnnnnnnnnnnnnnnnnnnnnnnnnnnnnnnnnnnnnnnnnnnnnnnnnnnnnnnnnnnnnnnnnnnnnnnnnnnnnnnnnnnnnnnnnnnnnnnnnnnnnnnnnnnnnnnnnnnnnnnnnnnnnnnnnnnnnnnnnnnnnnnnnnnnnnnnnnnnnnnnnnnnnnnnnnnnnnnnnnnnnnnnnnnnnnnnnnnnnnnnnnnnnnnnnnnnnnnnnnnnnnnnnnnnnnnnnnnnnnnnnnnnnnnnnnnnnnnnnnnnnnnnnnnnnnnnnnnnnnnnnnnnnnnnnnnnnnnnnnnnnnnnnnnnnnnnnnnnnnnnnnnnnnnnnnnnnnnnnnnnnnnnnnnnnnnnnnnnnnnnnnnnnnnnnnnnnnnnnnnnnnnnnnnnnnnnnnnnnnnnnnnnnnnnnnnnnnnnnnnnnnnnnnnnnnnnnnnnnnnnnnnnnnnnnnnnnnnnnnnnnnnnnnnnnnnnnnnnnnnnnnnnnnnnnnnnnnnnnnnnnnnnnnnnnnnnnnnnnnnnnnnnnnnnnnnnnnnnnnnnnnnnnnnnnnnnnnnnnnnnnnnnnnnnnnnnnnnnnnnnnnnnnnnnnnnnnnnnnnnnnnnnnnnnnnnnnnnnnnnnnnnnnnnnnnnnnnnnnnnnnnnnnnnnnnnnnnnnnnnnnnnnnnnnnnnnnnnnnnnnnnnnnnnnnnnnnnnnnnnnnnnnnnnnnnnnnnnnnnnnnnnnnnnnnnnnnnnnnnnnnnnnnnnnnnnnnnnnnnnnnnnnnnnnnnnnnnnnnnnnnnnnnnnnnnnnnnnnnnnnnnnnnnnnnnnnnnnnnnnnnnnnnnnnnnnnnnnnnnnnnnnnnnnnnnnnnnnnnnnnnnnnnnnnnnnnnnnnnnnnnnnnnnnnnnnnnnnnnnnnnnnnnnnnnnnnnnnnnnnnnnnnnnnnnnnnnnnnnnnnnnnnnnnnnnnnnnnnnnnnnnnnnnnnnnnnnnnnnnnnnnnnnnnnnnnnnnnnnnnnnnnnnnnnnnnnnnnnnnnnnnnnnnnnnnnnnnnnnnnnnnnnnnnnnnnnnnnnnnnnnnnnnnnnnnnnnnnnnnnnnnnnnnnnnnnnnnnnnnnnnnnnnnnnnnnnnnnnnnnnnnnnnnnnnnnnnnnnnnnnnnnnnnnnnnnnnnnnnnnnnnnnnnnnnnnnnnnnnnnnnnnnnnnnnnnnnnnnnnnnnnnnnnnnnnnnnnnnnnnnnnnnnnnnnnnnnnnnnnnnnnnnnnnnnnnnnnnnnnnnnnnnnnnnnnnnnnnnnnnnnnnnnnnnnnnnnnnnnnnnnnnnnnnnnnnnnnnnnnnnnnnnnnnnnnnnnnnnnnnnnnnnnnnnnnnnnnnnnnnnnnnnnnnnnnnnnnnnnnnnnnnnnnnnnnnnnnnnnnnnnnnnnnnnnnnnnnnnnnnnnnnnnnnnnnnnnnnnnnnnnnnnnnnnnnnnnnnnnnnnnnnnnnnnnnnnnnnnnnnnnnnnnnnnnnnnnnnnnnnnnnnnnnnnnnnnnnnnnnnnnnnnnnnnnnnnnnnnnnnnnnnnnnnnnnnnnnnnnnnnnnnnnnnnnnnnnnnnnnnnnnnnnnnnnnnnnnnnnnnnnnnnnnnnnnnnnnnnnnnnnnnnnnnnnnnnnnnnnnnnnnnnnnnnnnnnnnnnnnnnnnnnnnnnnnnnnnnnnnnnnnnnnnnnnnnnnnnnnnnnnnnnnnnnnnnnnnnnnnnnnnnnnnnnnnnnnnnnnnnnnnnnnnnnnnnnnnnnnnnnnnnnnnnnnnnnnnnnnnnnnnnnnnnnnnnnnnnnnnnnnnnnnnnnnnnnnnnnnnnnnnnnnnnnnnnnnnnnnnnnnnnnnnnnnnnnnnnnnnnnnnnnnnnnnnnnnnnnnnnnnnnnnnnnnnnnnnnnnnnnnnnnnnnnnnnnnnnnnnnnnnnnnnnnnnnnnnnnnnnnnnnnnnnnnnnnnnnnnnnnnnnnnnnnnnnnnnnnnnnnnnnnnnnnnnnnnnnnnnnnnnnnnnnnnnnnnnnnnnnnnnnnnnnnnnnnnnnnnnnnnnnnnnnnnnnnnnnnnnnnnnnnnnnnnnnnnnnnnnnnnnnnnnnnnnnnnnnnnnnnnnnnnnnnnnnnnnnnnnnnnnnnnnnnnnnnnnnnnnnnnnnnnnnnnnnnnnnnnnnnnnnnnnnnnnnnnnnnnnnnnnnnnnnnnnnnnnnnnnnnnnnnnnnnnnnnnnnnnnnnnnnnnnnnnnnnnnnnnnnnnnnnnnnnnnnnnnnnnnnnnnnnnnnnnnnnnnnnnnnnnnnnnnnnnnnnnnnnnnnnnnnnnnnnnnnnnnnnnnnnnnnnnnnnnnnnnnnnnnnnnnnnnnnnnnnnnnnnnnnnnnnnnnnnnnnnnnnnnnnnnnnnnnnnnnnnnnnnnnnnnnnnnnnnnnnnnnnnnnnnnnnnnnnnnnnnnnnnnnnnnnnnnnnnnnnnnnnnnnnnnnnnnnnnnnnnnnnnnnnnnnnnnnnnnnnnnnnnnnnnnnnnnnnnnnnnnnnnnnnnnnnnnnnnnnnnnnnnnnnnnnnnnnnnnnnnnnnnnnnnnnnnnnnnnnnnnnnnnnnnnnnnnnnnnnnnnnnnnnnnnnnnnnnnnnnnnnnnnnnnnnnnnnnnnnnnnnnnnnnnnnnnnnnnnnnnnnnnnnnnnnnnnnnnnnnnnnnnnnnnnnnnnnnnnnnnnnnnnnnnnnnnnnnnnnnnnnnnnnnnnnnnnnnnnnnnnnnnnnnnnnnnnnnnnnnnnnnnnnnnnnnnnnnnnnnnnnnnnnnnnnnnnnnnnnnnnnnnnnnnnnnnnnnnnnnnnnnnnnnnnnnnnnnnnnnnnnnnnnnnnnnnnnnnnnnnnnnnnnnnnnnnnnnnnnnnnnnnnnnnnnnnnnnnnnnnnnnnnnnnnnnnnnnnnnnnnnnnnnnnnnnnnnnnnnnnnnnnnnnnnnnnnnnnnnnnnnnnnnnnnnnnnnnnnnnnnnnnnnnnnnnnnnnnnnnnnnnnnnnnnnnnnnnnnnnnnnnnnnnnnnnnnnnnnnnnnnnnnnnnnnnnnnnnnnnnnnnnnnnnnnnnnnnnnnnnnnnnnnnnnnnnnnnnnnnnnnnnnnnnnnnnnnnnnnnnnnnnnnnnnnnnnnnnnnnnnnnnnnnnnnnnnnnnnnnnnnnnnnnnnnnnnnnnnnnnnnnnnnnnnnnnnnnnnnnnnnnnnnnnnnnnnnnnnnnnnnnnnnnnnnnnnnnnnnnnnnnnnnnnnnnnnnnnnnnnnnnnnnnnnnnnnnnnnnnnnnnnnnnnnnnnnnnnnnnnnnnnnnnnnnnnnnnnnnnnnnnnnnnnnnnnnnnnnnnnnnnnnnnnnnnnnnnnnnnnnnnnnnnnnnnnnnnnnnnnnnnnnnnnnnnnnnnnnnnnnnnnnnnnnnnnnnnnnnnnnnnnnnnnnnnnnnnnnnnnnnnnnnnnnnnnnnnnnnnnnnnnnnnnnnnnnnnnnnnnnnnnnnnnnnnnnnnnnnnnnnnnnnnnnnnnnnnnnnnnnnnnnnnnnnnnnnnnnnnnnnnnnnnnnnnnnnnnnnnnnnnnnnnnnnnnnnnnnnnnnnnnnnnnnnnnnnnnnnnnnnnnnnnnnnnnnnnnnnnnnnnnnnnnnnnnnnnnnnnnnnnnnnnnnnnnnnnnnnnnnnnnnnnnnnnnnnnnnnnnnnnnnnnnnnnnnnnnnnnnnnnnnnnnnnnnnnnnnnnnnnnnnnnnnnnnnnnnnnnnnnnnnnnnnnnnnnnnnnnnnnnnnnnnnnnnnnnnnnnnnnnnnnnnnnnnnnnnnnnnnnnnnnnnnnnnnnnnnnnnnnnnnnnnnnnnnnnnnnnnnnnnnnnnnnnnnnnnnnnnnnnnnnnnnnnnnnnnnnnnnnnnnnnnnnnnnnnnnnnnnnnnnnnnnnnnnnnnnnnnnnnnnnnnnnnnnnnnnnnnnnnnnnnnnnnnnnnnnnnnnnnnnnnnnnnnnnnnnnnnnnnnnnnnnnnnnnnnnnnnnnnnnnnnnnnnnnnnnnnnnnnnnnnnnnnnnnnnnnnnnnnnnnnnnnnnnnnnnnnnnnnnnnnnnnnnnnnnnnnnnnnnnnnnnnnnnnnnnnnnnnnnnnnnnnnnnnnnnnnnnnnnnnnnnnnnnnnnnnnnnnnnnnnnnnnnnnnnnnnnnnnnnnnnnnnnnnnnnnnnnnnnnnnnnnnnnnnnnnnnnnnnnnnnnnnnnnnnnnnnnnnnnnnnnnnnnnnnnnnnnnnnnnnnnnnnnnnnnnnnnnnnnnnnnnnnnnnnnnnnnnnnnnnnnnnnnnnnnnnnnnnnnnnnnnnnnnnnnnnnnnnnnnnnnnnnnnnnnnnnnnnnnnnnnnnnnnnnnnnnnnnnnnnnnnnnnnnnnnnnnnnnnnnnnnnnnnnnnnnnnnnnnnnnnnnnnnnnnnnnnnnnnnnnnnnnnnnnnnnnnnnnnnnnnnnnnnnnnnnnnnnnnnnnnnnnnnnnnnnnnnnnnnnnnnnnnnnnnnnnnnnnnnnnnnnnnnnnnnnnnnnnnnnnnnnnnnnnnnnnnnnnnnnnnnnnnnnnnnnnnnnnnnnnnnnnnnnnnnnnnnnnnnnnnnnnnnnnnnnnnnnnnnnnnnnnnnnnnnnnnnnnnnnnnnnnnnnnnnnnnnnnnnnnnnnnnnnnnnnnnnnnnnnnnnnnnnnnnnnnnnnnnnnnnnnnnnnnnnnnnnnnnnnnnnnnnnnnnnnnnnnnnnnnnnnnnnnnnnnnnnnnnnnnnnnnnnnnnnnnnnnnnnnnnnnnnnnnnnnnnnnnnnnnnnnnnnnnnnnnnnnnnnnnnnnnnnnnnnnnnnnnnnnnnnnnnnnnnnnnnnnnnnnnnnnnnnnnnnnnnnnnnnnnnnnnnnnnnnnnnnnnnnnnnnnnnnnnnnnnnnnnnnnnnnnnnnnnnnnnnnnnnnnnnnnnnnnnnnnnnnnnnnnnnnnnnnnnnnnnnnnnnnnnnnnnnnnnnnnnnnnnnnnnnnnnnnnnnnnnnnnnnnnnnnnnnnnnnnnnnnnnnnnnnnnnnnnnnnnnnnnnnnnnnnnnnnnnnnnnnnnnnnnnnnnnnnnnnnnnnnnnnnnnnnnnnnnnnnnnnnnnnnnnnnnnnnnnnnnnnnnnnnnnnnnnnnnnnnnnnnnnnnnnnnnnnnnnnnnnnnnnnnnnnnnnnnnnnnnnnnnnnnnnnnnnnnnnnnnnnnnnnnnnnnnnnnnnnnnnnnnnnnnnnnnnnnnnnnnnnnnnnnnnnnnnnnnnnnnnnnnnnnnnnnnnnnnnnnnnnnnnnnnnnnnnnnnnnnnnnnnnnnnnnnnnnnnnnnnnnnnnnnnnnnnnnnnnnnnnnnnnnnnnnnnnnnnnnnnnnnnnnnnnnnnnnnnnnnnnnnnnnnnnnnnnnnnnnnnnnnnnnnnnnnnnnnnnnnnnnnnnnnnnnnnnnnnnnnnnnnnnnnnnnnnnnnnnnnnnnnnnnnnnnnnnnnnnnnnnnnnnnnnnnnnnnnnnnnnnnnnnnnnnnnnnnnnnnnnnnnnnnnnnnnnnnnnnnnnnnnnnnnnnnnnnnnnnnnnnnnnnnnnnnnnnnnnnnnnnnnnnnnnnnnnnnnnnnnnnnnnnnnnnnnnnnnnnnnnnnnnnnnnnnnnnnnnnnnnnnnnnnnnnnnnnnnnnnnnnnnnnnnnnnnnnnnnnnnnnnnnnnnnnnnnnnnnnnnnnnnnnnnnnnnnnnnnnnnnnnnnnnnnnnnnnnnnnnnnnnnnnnnnnnnnnnnnnnnnnnnnnnnnnnnnnnnnnnnnnnnnnnnnnnnnnnnnnnnnnnnnnnnnnnnnnnnnnnnnnnnnnnnnnnnnnnnnnnnnnnnnnnnnnnnnnnnnnnnnnnnnnnnnnnnnnnnnnnnnnnnnnnnnnnnnnnnnnnnnnnnnnnnnnnnnnnnnnnnnnnnnnnnnnnnnnnnnnnnnnnnnnnnnnnnnnnnnnnnnnnnnnnnnnnnnnnnnnnnnnnnnnnnnnnnnnnnnnnnnnnnnnnnnnnnnnnnnnnnnnnnnnnnnnnnnnnnnnnnnnnnnnnnnnnnnnnnnnnnnnnnnnnnnnnnnnnnnnnnnnnnnnnnnnnnnnnnnnnnnnnnnnnnnnnnnnnnnnnnnnnnnnnnnnnnnnnnnnnnnnnnnnnnnnnnnnnnnnnnnnnnnnnnnnnnnnnnnnnnnnnnnnnnnnnnnnnnnnnnnnnnnnnnnnnnnnnnnnnnnnnnnnnnnnnnnnnnnnnnnnnnnnnnnnnnnnnnnnnnnnnnnnnnnnnnnnnnnnnnnnnnnnnnnnnnnnnnnnnnnnnnnnnnnnnnnnnnnnnnnnnnnnnnnnnnnnnnnnnnnnnnnnnnnnnnnnnnnnnnnnnnnnnnnnnnnnnnnnnnnnnnnnnnnnnnnnnnnnnnnnnnnnnnnnnnnnnnnnnnnnnnnnnnnnnnnnnnnnnnnnnnnnnnnnnnnnnnnnnnnnnnnnnnnnnnnnnnnnnnnnnnnnnnnnnnnnnnnnnnnnnnnnnnnnnnnnnnnnnnnnnnnnnnnnnnnnnnnnnnnnnnnnnnnnnnnnnnnnnnnnnnnnnnnnnnnnnnnnnnnnnnnnnnnnnnnnnnnnnnnnnnnnnnnnnnnnnnnnnnnnnnnnnnnnnnnnnnnnnnnnnnnnnnnnnnnnnnnnnnnnnnnnnnnnnnnnnnnnnnnnnnnnnnnnnnnnnnnnnnnnnnnnnnnnnnnnnnnnnnnnnnnnnnnnnnnnnnnnnnnnnnnnnnnnnnnnnnnnnnnnnnnnnnnnnnnnnnnnnnnnnnnnnnnnnnnnnnnnnnnnnnnnnnnnnnnnnnnnnnnnnnnnnnnnnnnnnnnnnnnnnnnnnnnnnnnnnnnnnnnnnnnnnnnnnnnnnnnnnnnnnnnnnnnnnnnnnnnnnnnnnnnnnnnnnnnnnnnnnnnnnnnnnnnnnnnnnnnnnnnnnnnnnnnnnnnnnnnnnnnnnnnnnnnnnnnnnnnnnnnnnnnnnnnnnnnnnnnnnnnnnnnnnnnnnnnnnnnnnnnnnnnnnnnnnnnnnnnnnnnnnnnnnnnnnnnnnnnnnnnnnnnnnnnnnnnnnnnnnnnnnnnnnnnnnnnnnnnnnnnnnnnnnnnnnnnnnnnnnnnnnnnnnnnnnnnnnnnnnnnnnnnnnnnnnnnnnnnnnnnnnnnnnnnnnnnnnnnnnnnnnnnnnnnnnnnnnnnnnnnnnnnnnnnnnnnnnnnnnnnnnnnnnnnnnnnnnnnnnnnnnnnnnnnnnnnnnnnnnnnnnnnnnnnnnnnnnnnnnnnnnnnnnnnnnnnnnnnnnnnnnnnnnnnnnnnnnnnnnnnnnnnnnnnnnnnnnnnnnnnnnnnnnnnnnnnnnnnnnnnnnnnnnnnnnnnnnnnnnnnnnnnnnnnnnnnnnnnnnnnnnnnnnnnnnnnnnnnnnnnnnnnnnnnnnnnnnnnnnnnnnnnnnnnnnnnnnnnnnnnnnnnnnnnnnnnnnnnnnnnnnnnnnnnnnnnnnnnnnnnnnnnnnnnnnnnnnnnnnnnnnnnnnnnnnnnnnnnnnnnnnnnnnnnnnnnnnnnnnnnnnnnnnnnnnnnnnnnnnnnnnnnnnnnnnnnnnnnnnnnnnnnnnnnnnnnnnnnnnnnnnnnnnnnnnnnnnnnnnnnnnnnnnnnnnnnnnnnnnnnnnnnnnnnnnnnnnnnnnnnnnnnnnnnnnnnnnnnnnnnnnnnnnnnnnnnnnnnnnnnnnnnnnnnnnnnnnnnnnnnnnnnnnnnnnnnnnnnnnnnnnnnnnnnnnnnnnnnnnnnnnnnnnnnnnnnnnnnnnnnnnnnnnnnnnnnnnnnnnnnnnnnnnnnnnnnnnnnnnnnnnnnnnnnnnnnnnnnnnnnnnnnnnnnnnnnnnnnnnnnnnnnnnnnnnnnnnnnnnnnnnnnnnnnnnnnnnnnnnnnnnnnnnnnnnnnnnnnnnnnnnnnnnnnnnnnnnnnnnnnnnnnnnnnnnnnnnnnnnnnnnnnnnnnnnnnnnnnnnnnnnnnnnnnnnnnnnnnnnnnnnnnnnnnnnnnnnnnnnnnnnnnnnnnnnnnnnnnnnnnnnnnnnnnnnnnnnnnnnnnnnnnnnnnnnnnnnnnnnnnnnnnnnnnnnnnnnnnnnnnnnnnnnnnnnnnnnnnnnnnnnnnnnnnnnnnnnnnnnnnnnnnnnnnnnnnnnnnnnnnnnnnnnnnnnnnnnnnnnnnnnnnnnnnnnnnnnnnnnnnnnnnnnnnnnnnnnnnnnnnnnnnnnnnnnnnnnnnnnnnnnnnnnnnnnnnnnnnnnnnnnnnnnnnnnnnnnnnnnnnnnnnnnnnnnnnnnnnnnnnnnnnnnnnnnnnnnnnnnnnnnnnnnnnnnnnnnnnnnnnnnnnnnnnnnnnnnnnnnnnnnnnnnnnnnnnnnnnnnnnnnnnnnnnnnnnnnnnnnnnnnnnnnnnnnnnnnnnnnnnnnnnnnnnnnnnnnnnnnnnnnnnnnnnnnnnnnnnnnnnnnnnnnnnnnnnnnnnnnnnnnnnnnnnnnnnnnnnnnnnnnnnnnnnnnnnnnnnnnnnnnnnnnnnnnnnnnnnnnnnnnnnnnnnnnnnnnnnnnnnnnnnnnnnnnnnnnnnnnnnnnnnnnnnnnnnnnnnnnnnnnnnnnnnnnnnnnnnnnnnnnnnnnnnnnnnnnnnnnnnnnnnnnnnnnnnnnnnnnnnnnnnnnnnnnnnnnnnnnnnnnnnnnnnnnnnnnnnnnnnnnnnnnnnnnnnnnnnnnnnnnnnnnnnnnnnnnnnnnnnnnnnnnnnnnnnnnnnnnnnnnnnnnnnnnnnnnnnnnnnnnnnnnnnnnnnnnnnnnnnnnnnnnnnnnnnnnnnnnnnnnnnnnnnnnnnnnnnnnnnnnnnnnnnnnnnnnnnnnnnnnnnnnnnnnnnnnnnnnnnnnnnnnnnnnnnnnnnnnnnnnnnnnnnnnnnnnnnnnnnnnnnnnnnnnnnnnnnnnnnnnnnnnnnnnnnnnnnnnnnnnnnnnnnnnnnnnnnnnnnnnnnnnnnnnnnnnnnnnnnnnnnnnnnnnnnnnnnnnnnnnnnnnnnnnnnnnnnnnnnnnnnnnnnnnnnnnnnnnnnnnnnnnnnnnnnnnnnnnnnnnnnnnnnnnnnnnnnnnnnnnnnnnnnnnnnnnnnnnnnnnnnnnnnnnnnnnnnnnnnnnnnnnnnnnnnnnnnnnnnnnnnnnnnnnnnnnnnnnnnnnnnnnnnnnnnnnnnnnnnnnnnnnnnnnnnnnnnnnnnnnnnnnnnnnnnnnnnnnnnnnnnnnnnnnnnnnnnnnnnnnnnnnnnnnnnnnnnnnnnnnnnnnnnnnnnnnnnnnnnnnnnnnnnnnnnnnnnnnnnnnnnnnnnnnnnnnnnnnnnnnnnnnnnnnnnnnnnnnnnnnnnnnnnnnnnnnnnnnnnnnnnnnnnnnnnnnnnnnnnnnnnnnnnnnnnnnnnnnnnnnnnnnnnnnnnnnnnnnnnnnnnnnnnnnnnnnnnnnnnnnnnnnnnnnnnnnnnnnnnnnnnnnnnnnnnnnnnnnnnnnnnnnnnnnnnnnnnnnnnnnnnnnnnnnnnnnnnnnnnnnnnnnnnnnnnnnnnnnnnnnnnnnnnnnnnnnnnnnnnnnnnnnnnnnnnnnnnnnnnnnnnnnnnnnnnnnnnnnnnnnnnnnnnnnnnnnnnnnnnnnnnnnnnnnnnnnnnnnnnnnnnnnnnnnnnnnnnnnnnnnnnnnnnnnnnnnnnnnnnnnnnnnnnnnnnnnnnnnnnnnnnnnnnnnnnnnnnnnnnnnnnnnnnnnnnnnnnnnnnnnnnnnnnnnnnnnnnnnnnnnnnnnnnnnnnnnnnnnnnnnnnnnnnnnnnnnnnnnnnnnnnnnnnnnnnnnnnnnnnnnnnnnnnnnnnnnnnnnnnnnnnnnnnnnnnnnnnnnnnnnnnnnnnnnnnnnnnnnnnnnnnnnnnnnnnnnnnnnnnnnnnnnnnnnnnnnnnnnnnnnnnnnnnnnnnnnnnnnnnnnnnnnnnnnnnnnnnnnnnnnnnnnnnnnnnnnnnnnnnnnnnnnnnnnnnnnnnnnnnnnnnnnnnnnnnnnnnnnnnnnnnnnnnnnnnnnnnnnnnnnnnnnnnnnnnnnnnnnnnnnnnnnnnnnnnnnnnnnnnnnnnnnnnnnnnnnnnnnnnnnnnnnnnnnnnnnnnnnnnnnnnnnnnnnnnnnnnnnnnnnnnnnnnnnnnnnnnnnnnnnnnnnnnnnnnnnnnnnnnnnnnnnnnnnnnnnnnnnnnnnnnnnnnnnnnnnnnnnnnnnnnnnnnnnnnnnnnnnnnnnnnnnnnnnnnnnnnnnnnnnnnnnnnnnnnnnnnnnnnnnnnnnnnnnnnnnnnnnnnnnnnnnnnnnnnnnnnnnnnnnnnnnnnnnnnnnnnnnnnnnnnnnnnnnnnnnnnnnnnnnnnnnnnnnnnnnnnnnnnnnnnnnnnnnnnnnnnnnnnnnnnnnnnnnnnnnnnnnnnnnnnnnnnnnnnnnnnnnnnnnnnnnnnnnnnnnnnnnnnnnnnnnnnnnnnnnnnnnnnnnnnnnnnnnnnnnnnnnnnnnnnnnnnnnnnnnnnnnnnnnnnnnnnnnnnnnnnnnnnnnnnnnnnnnnnnnnnnnnnnnnnnnnnnnnnnnnnnnnnnnnnnnnnnnnnnnnnnnnnnnnnnnnnnnnnnnnnnnnnnnnnnnnnnnnnnnnnnnnnnnnnnnnnnnnnnnnnnnnnnnnnnnnnnnnnnnnnnnnnnnnnnnnnnnnnnnnnnnnnnnnnnnnnnnnnnnnnnnnnnnnnnnnnnnnnnnnnnnnnnnnnnnnnnnnnnnnnnnnnnnnnnnnnnnnnnnnnnnnnnnnnnnnnnnnnnnnnnnnnnnnnnnnnnnnnnnnnnnnnnnnnnnnnnnnnnnnnnnnnnnnnnnnnnnnnnnnnnnnnnnnnnnnnnnnnnnnnnnnnnnnnnnnnnnnnnnnnnnnnnnnnnnnnnnnnnnnnnnnnnnnnnnnnnnnnnnnnnnnnnnnnnnnnnnnnnnnnnnnnnnnnnnnnnnnnnnnnnnnnnnnnnnnnnnnnnnnnnnnnnnnnnnnnnnnnnnnnnnnnnnnnnnnnnnnnnnnnnnnnnnnnnnnnnnnnnnnnnnnnnnnnnnnnnnnnnnnnnnnnnnnnnnnnnnnnnnnnnnnnnnnnnnnnnnnnnnnnnnnnnnnnnnnnnnnnnnnnnnnnnnnnnnnnnnnnnnnnnnnnnnnnnnnnnnnnnnnnnnnnnnnnnnnnnnnnnnnnnnnnnnnnnnnnnnnnnnnnnnnnnnnnnnnnnnnnnnnnnnnnnnnnnnnnnnnnnnnnnnnnnnnnnnnnnnnnnnnnnnnnnnnnnnnnnnnnnnnnnnnnnnnnnnnnnnnnnnnnnnnnnnnnnnnnnnnnnnnnnnnnnnnnnnnnnnnnnnnnnnnnnnnnnnnnnnnnnnnnnnnnnnnnnnnnnnnnnnnnnnnnnnnnnnnnnnnnnnnnnnnnnnnnnnnnnnnnnnnnnnnnnnnnnnnnnnnnnnnnnnnnnnnnnnnnnnnnnnnnnnnnnnnnnnnnnnnnnnnnnnnnnnnnnnnnnnnnnnnnnnnnnnnnnnnnnnnnnnnnnnnnnnnnnnnnnnnnnnnnnnnnnnnnnnnnnnnnnnnnnnnnnnnnnnnnnnnnnnnnnnnnnnnnnnnnnnnnnnnnnnnnnnnnnnnnnnnnnnnnnnnnnnnnnnnnnnnnnnnnnnnnnnnnnnnnnnnnnnnnnnnnnnnnnnnnnnnnnnnnnnnnnnnnnnnnnnnnnnnnnnnnnnnnnnnnnnnnnnnnnnnnnnnnnnnnnnnnnnnnnnnnnnnnnnnnnnnnnnnnnnnnnnnnnnnnnnnnnnnnnnnnnnnnnnnnnnnnnnnnnnnnnnnnnnnnnnnnnnnnnnnnnnnnnnnnnnnnnnnnnnnnnnnnnnnnnnnnnnnnnnnnnnnnnnnnnnnnnnnnnnnnnnnnnnnnnnnnnnnnnnnnnnnnnnnnnnnnnnnnnnnnnnnnnnnnnnnnnnnnnnnnnnnnnnnnnnnnnnnnnnnnnnnnnnnnnnnnnnnnnnnnnnnnnnnnnnnnnnnnnnnnnnnnnnnnnnnnnnnnnnnnnnnnnnnnnnnnnnnnnnnnnnnnnnnnnnnnnnnnnnnnnnnnnnnnnnnnnnnnnnnnnnnnnnnnnnnnnnnnnnnnnnnnnnnnnnnnnnnnnnnnnnnnnnnnnnnnnnnnnnnnnnnnnnnnnnnnnnnnnnnnnnnnnnnnnnnnnnnnnnnnnnnnnnnnnnnnnnnnnnnnnnnnnnnnnnnnnnnnnnnnnnnnnnnnnnnnnnnnnnnnnnnnnnnnnnnnnnnnnnnnnnnnnnnnnnnnnnnnnnnnnnnnnnnnnnnnnnnnnnnnnnnnnnnnnnnnnnnnnnnnnnnnnnnnnnnnnnnnnnnnnnnnnnnnnnnnnnnnnnnnnnnnnnnnnnnnnnnnnnnnnnnnnnnnnnnnnnnnnnnnnnnnnnnnnnnnnnnnnnnnnnnnnnnnnnnnnnnnnnnnnnnnnnnnnnnnnnnnnnnnnnnnnnnnnnnnnnnnnnnnnnnnnnnnnnnnnnnnnnnnnnnnnnnnnnnnnnnnnnnnnnnnnnnnnnnnnnnnnnnnnnnnnnnnnnnnnnnnnnnnnnnnnnnnnnnnnnnnnnnnnnnnnnnnnnnnnnnnnnnnnnnnnnnnnnnnnnnnnnnnnnnnnnnnnnnnnnnnnnnnnnnnnnnnnnnnnnnnnnnnnnnnnnnnnnnnnnnnnnnnnnnnnnnnnnnnnnnnnnnnnnnnnnnnnnnnnnnnnnnnnnnnnnnnnnnnnnnnnnnnnnnnnnnnnnnnnnnnnnnnnnnnnnnnnnnnnnnnnnnnnnnnnnnnnnnnnnnnnnnnnnnnnnnnnnnnnnnnnnnnnnnnnnnnnnnnnnnnnnnnnnnnnnnnnnnnnnnnnnnnnnnnnnnnnnnnnnnnnnnnnnnnnnnnnnnnnnnnnnnnnnnnnnnnnnnnnnnnnnnnnnnnnnnnnnnnnnnnnnnnnnnnnnnnnnnnnnnnnnnnnnnnnnnnnnnnnnnnnnnnnnnnnnnnnnnnnnnnnnnnnnnnnnnnnnnnnnnnnnnnnnnnnnnnnnnnnnnnnnnnnnnnnnnnnnnnnnnnnnnnnnnnnnnnnnnnnnnnnnnnnnnnnnnnnnnnnnnnnnnnnnnnnnnnnnnnnnnnnnnnnnnnnnnnnnnnnnnnnnnnnnnnnnnnnnnnnnnnnnnnnnnnnnnnnnnnnnnnnnnnnnnnnnnnnnnnnnnnnnnnnnnnnnnnnnnnnnnnnnnnnnnnnnnnnnnnnnnnnnnnnnnnnnnnnnnnnnnnnnnnnnnnnnnnnnnnnnnnnnnnnnnnnnnnnnnnnnnnnnnnnnnnnnnnnnnnnnnnnnnnnnnnnnnnnnnnnnnnnnnnnnnnnnnnnnnnnnnnnnnnnnnnnnnnnnnnnnnnnnnnnnnnnnnnnnnnnnnnnnnnnnnnnnnnnnnnnnnnnnnnnnnnnnnnnnnnnnnnnnnnnnnnnnnnnnnnnnnnnnnnnnnnnnnnnnnnnnnnnnnnnnnnnnnnnnnnnnnnnnnnnnnnnnnnnnnnnnnnnnnnnnnnnnnnnnnnnnnnnnnnnnnnnnnnnnnnnnnnnnnnnnnnnnnnnnnnnnnnnnnnnnnnnnnnnnnnnnnnnnnnnnnnnnnnnnnnnnnnnnnnnnnnnnnnnnnnnnnnnnnnnnnnnnnnnnnnnnnnnnnnnnnnnnnnnnnnnnnnnnnnnnnnnnnnnnnnnnnnnnnnnnnnnnnnnnnnnnnnnnnnnnnnnnnnnnnnnnnnnnnnnnnnnnnnnnnnnnnnnnnnnnnnnnnnnnnnnnnnnnnnnnnnnnnnnnnnnnnnnnnnnnnnnnnnnnnnnnnnnnnnnnnnnnnnnnnnnnnnnnnnnnnnnnnnnnnnnnnnnnnnnnnnnnnnnnnnnnnnnnnnnnnnnnnnnnnnnnnnnnnnnnnnnnnnnnnnnnnnnnnnnnnnnnnnnnnnnnnnnnnnnnnnnnnnnnnnnnnnnnnnnnnnnnnnnnnnnnnnnnnnnnnnnnnnnnnnnnnnnnnnnnnnnnnnnnnnnnnnnnnnnnnnnnnnnnnnnnnnnnnnnnnnnnnnnnnnnnnnnnnnnnnnnnnnnnnnnnnnnnnnnnnnnnnnnnnnnnnnnnnnnnnnnnnnnnnnnnnnnnnnnnnnnnnnnnnnnnnnnnnnnnnnnnnnnnnnnnnnnnnnnnnnnnnnnnnnnnnnnnnnnnnnnnnnnnnnnnnnnnnnnnnnnnnnnnnnnnnnnnnnnnnnnnnnnnnnnnnnnnnnnnnnnnnnnnnnnnnnnnnnnnnnnnnnnnnnnnnnnnnnnnnnnnnnnnnnnnnnnnnnnnnnnnnnnnnnnnnnnnnnnnnnnnnnnnnnnnnnnnnnnnnnnnnnnnnnnnnnnnnnnnnnnnnnnnnnnnnnnnnnnnnnnnnnnnnnnnnnnnnnnnnnnnnnnnnnnnnnnnnnnnnnnnnnnnnnnnnnnnnnnnnnnnnnnnnnnnnnnnnnnnnnnnnnnnnnnnnnnnnnnnnnnnnnnnnnnnnnnnnnnnnnnnnnnnnnnnnnnnnnnnnnnnnnnnnnnnnnnnnnnnnnnnnnnnnnnnnnnnnnnnnnnnnnnnnnnnnnnnnnnnnnnnnnnnnnnnnnnnnnnnnnnnnnnnnnnnnnnnnnnnnnnnnnnnnnnnnnnnnnnnnnnnnnnnnnnnnnnnnnnnnnnnnnnnnnnnnnnnnnnnnnnnnnnnnnnnnnnnnnnnnnnnnnnnnnnnnnnnnnnnnnnnnnnnnnnnnnnnnnnnnnnnnnnnnnnnnnnnnnnnnnnnnnnnnnnnnnnnnnnnnnnnnnnnnnnnnnnnnnnnnnnnnnnnnnnnnnnnnnnnnnnnnnnnnnnnnnnnnnnnnnnnnnnnnnnnnnnnnnnnnnnnnnnnnnnnnnnnnnnnnnnnnnnnnnnnnnnnnnnnnnnnnnnnnnnnnnnnnnnnnnnnnnnnnnnnnnnnnnnnnnnnnnnnnnnnnnnnnnnnnnnnnnnnnnnnnnnnnnnnnnnnnnnnnnnnnnnnnnnnnnnnnnnnnnnnnnnnnnnnnnnnnnnnnnnnnnnnnnnnnnnnnnnnnnnnnnnnnnnnnnnnnnnnnnnnnnnnnnnnnnnnnnnnnnnnnnnnnnnnnnnnnnnnnnnnnnnnnnnnnnnnnnnnnnnnnnnnnnnnnnnnnnnnnnnnnnnnnnnnnnnnnnnnnnnnnnnnnnnnnnnnnnnnnnnnnnnnnnnnnnnnnnnnnnnnnnnnnnnnnnnnnnnnnnnnnnnnnnnnnnnnnnnnnnnnnnnnnnnnnnnnnnnnnnnnnnnnnnnnnnnnnnnnnnnnnnnnnnnnnnnnnnnnnnnnnnnnnnnnnnnnnnnnnnnnnnnnnnnnnnnnnnnnnnnnnnnnnnnnnnnnnnnnnnnnnnnnnnnnnnnnnnnnnnnnnnnnnnnnnnnnnnnnnnnnnnnnnnnnnnnnnnnnnnnnnnnnnnnnnnnnnnnnnnnnnnnnnnnnnnnnnnnnnnnnnnnnnnnnnnnnnnnnnnnnnnnnnnnnnnnnnnnnnnnnnnnnnnnnnnnnnnnnnnnnnnnnnnnnnnnnnnnnnnnnnnnnnnnnnnnnnnnnnnnnnnnnnnnnnnnnnnnnnnnnnnnnnnnnnnnnnnnnnnnnnnnnnnnnnnnnnnnnnnnnnnnnnnnnnnnnnnnnnnnnnnnnnnnnnnnnnnnnnnnnnnnnnnnnnnnnnnnnnnnnnnnnnnnnnnnnnnnnnnnnnnnnnnnnnnnnnnnnnnnnnnnnnnnnnnnnnnnnnnnnnnnnnnnnnnnnnnnnnnnnnnnnnnnnnnnnnnnnnnnnnnnnnnnnnnnnnnnnnnnnnnnnnnnnnnnnnnnnnnnnnnnnnnnnnnnnnnnnnnnnnnnnnnnnnnnnnnnnnnnnnnnnnnnnnnnnnnnnnnnnnnnnnnnnnnnnnnnnnnnnnnnnnnnnnnnnnnnnnnnnnnnnnnnnnnnnnnnnnnnnnnnnnnnnnnnnnnnnnnnnnnnnnnnnnnnnnnnnnnnnnnnnnnnnnnnnnnnnnnnnnnnnnnnnnnnnnnnnnnnnnnnnnnnnnnnnnnnnnnnnnnnnnnnnnnnnnnnnnnnnnnnnnnnnnnnnnnnnnnnnnnnnnnnnnnnnnnnnnnnnnnnnnnnnnnnnnnnnnnnnnnnnnnnnnnnnnnnnnnnnnnnnnnnnnnnnnnnnnnnnnnnnnnnnnnnnnnnnnnnnnnnnnnnnnnnnnnnnnnnnnnnnnnnnnnnnnnnnnnnnnnnnnnnnnnnnnnnnnnnnnnnnnnnnnnnnnnnnnnnnnnnnnnnnnnnnnnnnnnnnnnnnnnnnnnnnnnnnnnnnnnnnnnnnnnnnnnnnnnnnnnnnnnnnnnnnnnnnnnnnnnnnnnnnnnnnnnnnnnnnnnnnnnnnnnnnnnnnnnnnnnnnnnnnnnnnnnnnnnnnnnnnnnnnnnnnnnnnnnnnnnnnnnnnnnnnnnnnnnnnnnnnnnnnnnnnnnnnnnnnnnnnnnnnnnnnnnnnnnnnnnnnnnnnnnnnnnnnnnnnnnnnnnnnnnnnnnnnnnnnnnnnnnnnnnnnnnnnnnnnnnnnnnnnnnnnnnnnnnnnnnnnnnnnnnnnnnnnnnnnnnnnnnnnnnnnnnnnnnnnnnnnnnnnnnnnnnnnnnnnnnnnnnnnnnnnnnnnnnnnnnnnnnnnnnnnnnnnnnnnnnnnnnnnnnnnnnnnnnnnnnnnnnnnnnnnnnnnnnnnnnnnnnnnnnnnnnnnnnnnnnnnnnnnnnnnnnnnnnnnnnnnnnnnnnnnnnnnnnnnnnnnnnnnnnnnnnnnnnnnnnnnnnnnnnnnnnnnnnnnnnnnnnnnnnnnnnnnnnnnnnnnnnnnnnnnnnnnnnnnnnnnnnnnnnnnnnnnnnnnnnnnnnnnnnnnnnnnnnnnnnnnnnnnnnnnnnnnnnnnnnnnnnnnnnnnnnnnnnnnnnnnnnnnnnnnnnnnnnnnnnnnnnnnnnnnnnnnnnnnnnnnnnnnnnnnnnnnnnnnnnnnnnnnnnnnnnnnnnnnnnnnnnnnnnnnnnnnnnnnnnnnnnnnnnnnnnnnnnnnnnnnnnnnnnnnnnnnnnnnnnnnnnnnnnnnnnnnnnnnnnnnnnnnnnnnnnnnnnnnnnnnnnnnnnnnnnnnnnnnnnnnnnnnnnnnnnnnnnnnnnnnnnnnnnnnnnnnnnnnnnnnnnnnnnnnnnnnnnnnnnnnnnnnnnnnnnnnnnnnnnnnnnnnnnnnnnnnnnnnnnnnnnnnnnnnnnnnnnnnnnnnnnnnnnnnnnnnnnnnnnnnnnnnnnnnnnnnnnnnnnnnnnnnnnnnnnnnnnnnnnnnnnnnnnnnnnnnnnnnnnnnnnnnnnnnnnnnnnnnnnnnnnnnnnnnnnnnnnnnnnnnnnnnnnnnnnnnnnnnnnnnnnnnnnnnnnnnnnnnnnnnnnnnnnnnnnnnnnnnnnnnnnnnnnnnnnnnnnnnnnnnnnnnnnnnnnnnnnnnnnnnnnnnnnnnnnnnnnnnnnnnnnnnnnnnnnnnnnnnnnnnnnnnnnnnnnnnnnnnnnnnnnnnnnnnnnnnnnnnnnnnnnnnnnnnnnnnnnnnnnnnnnnnnnnnnnnnnnnnnnnnnnnnnnnnnnnnnnnnnnnnnnnnnnnnnnnnnnnnnnnnnnnnnnnnnnnnnnnnnnnnnnnnnnnnnnnnnnnnnnnnnnnnnnnnnnnnnnnnnnnnnnnnnnnnnnnnnnnnnnnnnnnnnnnnnnnnnnnnnnnnnnnnnnnnnnnnnnnnnnnnnnnnnnnnnnnnnnnnnnnnnnnnnnnnnnnnnnnnnnnnnnnnnnnnnnnnnnnnnnnnnnnnnnnnnnnnnnnnnnnnnnnnnnnnnnnnnnnnnnnnnnnnnnnnnnnnnnnnnnnnnnnnnnnnnnnnnnnnnnnnnnnnnnnnnnnnnnnnnnnnnnnnnnnnnnnnnnnnnnnnnnnnnnnnnnnnnnnnnnnnnnnnnnnnnnnnnnnnnnnnnnnnnnnnnnnnnnnnnnnnnnnnnnnnnnnnnnnnnnnnnnnnnnnnnnnnnnnnnnnnnnnnnnnnnnnnnnnnnnnnnnnnnnnnnnnnnnnnnnnnnnnnnnnnnnnnnnnnnnnnnnnnnnnnnnnnnnnnnnnnnnnnnnnnnnnnnnnnnnnnnnnnnnnnnnnnnnnnnnnnnnnnnnnnnnnnnnnnnnnnnnnnnnnnnnnnnnnnnnnnnnnnnnnnnnnnnnnnnnnnnnnnnnnnnnnnnnnnnnnnnnnnnnnnnnnnnnnnnnnnnnnnnnnnnnnnnnnnnnnnnnnnnnnnnnnnnnnnnnnnnnnnnnnnnnnnnnnnnnnnnnnnnnnnnnnnnnnnnnnnnnnnnnnnnnnnnnnnnnnnnnnnnnnnnnnnnnnnnnnnnnnnnnnnnnnnnnnnnnnnnnnnnnnnnnnnnnnnnnnnnnnnnnnnnnnnnnnnnnnnnnnnnnnnnnnnnnnnnnnnnnnnnnnnnnnnnnnnnnnnnnnnnnnnnnnnnnnnnnnnnnnnnnnnnnnnnnnnnnnnnnnnnnnnnnnnnnnnnnnnnnnnnnnnnnnnnnnnnnnnnnnnnnnnnnnnnnnnnnnnnnnnnnnnnnnnnnnnnnnnnnnnnnnnnnnnnnnnnnnnnnnnnnnnnnnnnnnnnnnnnnnnnnnnnnnnnnnnnnnnnnnnnnnnnnnnnnnnnnnnnnnnnnnnnnnnnnnnnnnnnnnnnnnnnnnnnnnnnnnnnnnnnnnnnnnnnnnnnnnnnnnnnnnnnnnnnnnnnnnnnnnnnnnnnnnnnnnnnnnnnnnnnnnnnnnnnnnnnnnnnnnnnnnnnnnnnnnnnnnnnnnnnnnnnnnnnnnnnnnnnnnnnnnnnnnnnnnnnnnnnnnnnnnnnnnnnnnnnnnnnnnnnnnnnnnnnnnnnnnnnnnnnnnnnnnnnnnnnnnnnnnnnnnnnnnnnnnnnnnnnnnnnnnnnnnnnnnnnnnnnnnnnnnnnnnnnnnnnnnnnnnnnnnnnnnnnnnnnnnnnnnnnnnnnnnnnnnnnnnnnnnnnnnnnnnnnnnnnnnnnnnnnnnnnnnnnnnnnnnnnnnnnnnnnnnnnnnnnnnnnnnnnnnnnnnnnnnnnnnnnnnnnnnnnnnnnnnnnnnnnnnnnnnnnnnnnnnnnnnnnnnnnnnnnnnnnnnnnnnnnnnnnnnnnnnnnnnnnnnnnnnnnnnnnnnnnnnnnnnnnnnnnnnnnnnnnnnnnnnnnnnnnnnnnnnnnnnnnnnnnnnnnnnnnnnnnnnnnnnnnnnnnnnnnnnnnnnnnnnnnnnnnnnnnnnnnnnnnnnnnnnnnnnnnnnnnnnnnnnnnnnnnnnnnnnnnnnnnnnnnnnnnnnnnnnnnnnnnnnnnnnnnnnnnnnnnnnnnnnnnnnnnnnnnnnnnnnnnnnnnnnnnnnnnnnnnnnnnnnnnnnnnnnnnnnnnnnnnnnnnnnnnnnnnnnnnnnnnnnnnnnnnnnnnnnnnnnnnnnnnnnnnnnnnnnnnnnnnnnnnnnnnnnnnnnnnnnnnnnnnnnnnnnnnnnnnnnnnnnnnnnnnnnnnnnnnnnnnnnnnnnnnnnnnnnnnnnnnnnnnnnnnnnnnnnnnnnnnnnnnnnnnnnnnnnnnnnnnnnnnnnnnnnnnnnnnnnnnnnnnnnnnnnnnnnnnnnnnnnnnnnnnnnnnnnnnnnnnnnnnnnnnnnnnnnnnnnnnnnnnnnnnnnnnnnnnnnnnnnnnnnnnnnnnnnnnnnnnnnnnnnnnnnnnnnnnnnnnnnnnnnnnnnnnnnnnnnnnnnnnnnnnnnnnnnnnnnnnnnnnnnnnnnnnnnnnnnnnnnnnnnnnnnnnnnnnnnnnnnnnnnnnnnnnnnnnnnnnnnnnnnnnnnnnnnnnnnnnnnnnnnnnnnnnnnnnnnnnnnnnnnnnnnnnnnnnnnnnnnnnnnnnnnnnnnnnnnnnnnnnnnnnnnnnnnnnnnnnnnnnnnnnnnnnnnnnnnnnnnnnnnnnnnnnnnnnnnnnnnnnnnnnnnnnnnnnnnnnnnnnnnnnnnnnnnnnnnnnnnnnnnnnnnnnnnnnnnnnnnnnnnnnnnnnnnnnnnnnnnnnnnnnnnnnnnnnnnnnnnnnnnnnnnnnnnnnnnnnnnnnnnnnnnnnnnnnnnnnnnnnnnnnnnnnnnnnnnnnnnnnnnnnnnnnnnnnnnnnnnnnnnnnnnnnnnnnnnnnnnnnnnnnnnnnnnnnnnnnnnnnnnnnnnnnnnnnnnnnnnnnnnnnnnnnnnnnnnnnnnnnnnnnnnnnnnnnnnnnnnnnnnnnnnnnnnnnnnnnnnnnnnnnnnnnnnnnnnnnnnnnnnnnnnnnnnnnnnnnnnnnnnnnnnnnnnnnnnnnnnnnnnnnnnnnnnnnnnnnnnnnnnnnnnnnnnnnnnnnnnnnnnnnnnnnnnnnnnnnnnnnnnnnnnnnnnnnnnnnnnnnnnnnnnnnnnnnnnnnnnnnnnnnnnnnnnnnnnnnnnnnnnnnnnnnnnnnnnnnnnnnnnnnnnnnnnnnnnnnnnnnnnnnnnnnnnnnnnnnnnnnnnnnnnnnnnnnnnnnnnnnnnnnnnnnnnnnnnnnnnnnnnnnnnnnnnnnnnnnnnnnnnnnnnnnnnnnnnnnnnnnnnnnnnnnnnnnnnnnnnnnnnnnnnnnnnnnnnnnnnnnnnnnnnnnnnnnnnnnnnnnnnnnnnnnnnnnnnnnnnnnnnnnnnnnnnnnnnnnnnnnnnnnnnnnnnnnnnnnnnnnnnnnnnnnnnnnnnnnnnnnnnnnnnnnnnnnnnnnnnnnnnnnnnnnnnnnnnnnnnnnnnnnnnnnnnnnnnnnnnnnnnnnnnnnnnnnnnnnnnnnnnnnnnnnnnnnnnnnnnnnnnnnnnnnnnnnnnnnnnnnnnnnnnnnnnnnnnnnnnnnnnnnnnnnnnnnnnnnnnnnnnnnnnnnnnnnnnnnnnnnnnnnnnnnnnnnnnnnnnnnnnnnnnnnnnnnnnnnnnnnnnnnnnnnnnnnnnnnnnnnnnnnnnnnnnnnnnnnnnnnnnnnnnnnnnnnnnnnnnnnnnnnnnnnnnnnnnnnnnnnnnnnnnnnnnnnnnnnnnnnnnnnnnnnnnnnnnnnnnnnnnnnnnnnnnnnnnnnnnnnnnnnnnnnnnnnnnnnnnnnnnnnnnnnnnnnnnnnnnnnnnnnnnnnnnnnnnnnnnnnnnnnnnnnnnnnnnnnnnnnnnnnnnnnnnnnnnnnnnnnnnnnnnnnnnnnnnnnnnnnnnnnnnnnnnnnnnnnnnnnnnnnnnnnnnnnnnnnnnnnnnnnnnnnnnnnnnnnnnnnnnnnnnnnnnnnnnnnnnnnnnnnnnnnnnnnnnnnnnnnnnnnnnnnnnnnnnnnnnnnnnnnnnnnnnnnnnnnnnnnnnnnnnnnnnnnnnnnnnnnnnnnnnnnnnnnnnnnnnnnnnnnnnnnnnnnnnnnnnnnnnnnnnnnnnnnnnnnnnnnnnnnnnnnnnnnnnnnnnnnnnnnnnnnnnnnnnnnnnnnnnnnnnnnnnnnnnnnnnnnnnnnnnnnnnnnnnnnnnnnnnnnnnnnnnnnnnnnnnnnnnnnnnnnnnnnnnnnnnnnnnnnnnnnnnnnnnnnnnnnnnnnnnnnnnnnnnnnnnnnnnnnnnnnnnnnnnnnnnnnnnnnnnnnnnnnnnnnnnnnnnnnnnnnnnnnnnnnnnnnnnnnnnnnnnnnnnnnnnnnnnnnnnnnnnnnnnnnnnnnnnnnnnnnnnnnnnnnnnnnnnnnnnnnnnnnnnnnnnnnnnnnnnnnnnnnnnnnnnnnnnnnnnnnnnnnnnnnnnnnnnnnnnnnnnnnnnnnnnnnnnnnnnnnnnnnnnnnnnnnnnnnnnnnnnnnnnnnnnnnnnnnnnnnnnnnnnnnnnnnnnnnnnnnnnnnnnnnnnnnnnnnnnnnnnnnnnnnnnnnnnnnnnnnnnnnnnnnnnnnnnnnnnnnnnnnnnnnnnnnnnnnnnnnnnnnnnnnnnnnnnnnnnnnnnnnnnnnnnnnnnnnnnnnnnnnnnnnnnnnnnnnnnnnnnnnnnnnnnnnnnnnnnnnnnnnnnnnnnnnnnnnnnnnnnnnnnnnnnnnnnnnnnnnnnnnnnnnnnnnnnnnnnnnnnnnnnnnnnnnnnnnnnnnnnnnnnnnnnnnnnnnnnnnnnnnnnnnnnnnnnnnnnnnnnnnnnnnnnnnnnnnnnnnnnnnnnnnnnnnnnnnnnnnnnnnnnnnnnnnnnnnnnnnnnnnnnnnnnnnnnnnnnnnnnnnnnnnnnnnnnnnnnnnnnnnnnnnnnnnnnnnnnnnnnnnnnnnnnnnnnnnnnnnnnnnnnnnnnnnnnnnnnnnnnnnnnnnnnnnnnnnnnnnnnnnnnnnnnnnnnnnnnnnnnnnnnnnnnnnnnnnnnnnnnnnnnnnnnnnnnnnnnnnnnnnnnnnnnnnnnnnnnnnnnnnnnnnnnnnnnnnnnnnnnnnnnnnnnnnnnnnnnnnnnnnnnnnnnnnnnnnnnnnnnnnnnnnnnnnnnnnnnnnnnnnnnnnnnnnnnnnnnnnnnnnnnnnnnnnnnnnnnnnnnnnnnnnnnnnnnnnnnnnnnnnnnnnnnnnnnnnnnnnnnnnnnnnnnnnnnnnnnnnnnnnnnnnnnnnnnnnnnnnnnnnnnnnnnnnnnnnnnnnnnnnnnnnnnnnnnnnnnnnnnnnnnnnnnnnnnnnnnnnnnnnnnnnnnnnnnnnnnnnnnnnnnnnnnnnnnnnnnnnnnnnnnnnnnnnnnnnnnnnnnnnnnnnnnnnnnnnnnnnnnnnnnnnnnnnnnnnnnnnnnnnnnnnnnnnnnnnnnnnnnnnnnnnnnnnnnnnnnnnnnnnnnnnnnnnnnnnnnnnnnnnnnnnnnnnnnnnnnnnnnnnnnnnnnnnnnnnnnnnnnnnnnnnnnnnnnnnnnnnnnnnnnnnnnnnnnnnnnnnnnnnnnnnnnnnnnnnnnnnnnnnnnnnnnnnnnnnnnnnnnnnnnnnnnnnnnnnnnnnnnnnnnnnnnnnnnnnnnnnnnnnnnnnnnnnnnnnnnnnnnnnnnnnnnnnnnnnnnnnnnnnnnnnnnnnnnnnnnnnnnnnnnnnnnnnnnnnnnnnnnnnnnnnnnnnnnnnnnnnnnnnnnnnnnnnnnnnnnnnnnnnnnnnnnnnnnnnnnnnnnnnnnnnnnnnnnnnnnnnnnnnnnnnnnnnnnnnnnnnnnnnnnnnnnnnnnnnnnnnnnnnnnnnnnnnnnnnnnnnnnnnnnnnnnnnnnnnnnnnnnnnnnnnnnnnnnnnnnnnnnnnnnnnnnnnnnnnnnnnnnnnnnnnnnnnnnnnnnnnnnnnnnnnnnnnnnnnnnnnnnnnnnnnnnnnnnnnnnnnnnnnnnnnnnnnnnnnnnnnnnnnnnnnnnnnnnnnnnnnnnnnnnnnnnnnnnnnnnnnnnnnnnnnnnnnnnnnnnnnnnnnnnnnnnnnnnnnnnnnnnnnnnnnnnnnnnnnnnnnnnnnnnnnnnnnnnnnnnnnnnnnnnnnnnnnnnnnnnnnnnnnnnnnnnnnnnnnnnnnnnnnnnnnnnnnnnnnnnnnnnnnnnnnnnnnnnnnnnnnnnnnnnnnnnnnnnnnnnnnnnnnnnnnnnnnnnnnnnnnnnnnnnnnnnnnnnnnnnnnnnnnnnnnnnnnnnnnnnnnnnnnnnnnnnnnnnnnnnnnnnnnnnnnnnnnnnnnnnnnnnnnnnnnnnnnnnnnnnnnnnnnnnnnnnnnnnnnnnnnnnnnnnnnnnnnnnnnnnnnnnnnnnnnnnnnnnnnnnnnnnnnnnnnnnnnnnnnnnnnnnnnnnnnnnnnnnnnnnnnnnnnnnnnnnnnnnnnnnnnnnnnnnnnnnnnnnnnnnnnnnnnnnnnnnnnnnnnnnnnnnnnnnnnnnnnnnnnnnnnnnnnnnnnnnnnnnnnnnnnnnnnnnnnnnnnnnnnnnnnnnnnnnnnnnnnnnnnnnnnnnnnnnnnnnnnnnnnnnnnnnnnnnnnnnnnnnnnnnnnnnnnnnnnnnnnnnnnnnnnnnnnnnnnnnnnnnnnnnnnnnnnnnnnnnnnnnnnnnnnnnnnnnnnnnnnnnnnnnnnnnnnnnnnnnnnnnnnnnnnnnnnnnnnnnnnnnnnnnnnnnnnnnnnnnnnnnnnnnnnnnnnnnnnnnnnnnnnnnnnnnnnnnnnnnnnnnnnnnnnnnnnnnnnnnnnnnnnnnnnnnnnnnnnnnnnnnnnnnnnnnnnnnnnnnnnnnnnnnnnnnnnnnnnnnnnnnnnnnnnnnnnnnnnnnnnnnnnnnnnnnnnnnnnnnnnnnnnnnnnnnnnnnnnnnnnnnnnnnnnnnnnnnnnnnnnnnnnnnnnnnnnnnnnnnnnnnnnnnnnnnnnnnnnnnnnnnnnnnnnnnnnnnnnnnnnnnnnnnnnnnnnnnnnnnnnnnnnnnnnnnnnnnnnnnnnnnnnnnnnnnnnnnnnnnnnnnnnnnnnnnnnnnnnnnnnnnnnnnnnnnnnnnnnnnnnnnnnnnnnnnnnnnnnnnnnnnnnnnnnnnnnnnnnnnnnnnnnnnnnnnnnnnnnnnnnnnnnnnnnnnnnnnnnnnnnnnnnnnnnnnnnnnnnnnnnnnnnnnnnnnnnnnnnnnnnnnnnnnnnnnnnnnnnnnnnnnnnnnnnnnnnnnnnnnnnnnnnnnnnnnnnnnnnnnnnnnnnnnnnnnnnnnnnnnnnnnnnnnnnnnnnnnnnnnnnnnnnnnnnnnnnnnnnnnnnnnnnnnnnnnnnnnnnnnnnnnnnnnnnnnnnnnnnnnnnnnnnnnnnnnnnnnnnnnnnnnnnnnnnnnnnnnnnnnnnnnnnnnnnnnnnnnnnnnnnnnnnnnnnnnnnnnnnnnnnnnnnnnnnnnnnnnnnnnnnnnnnnnnnnnnnnnnnnnnnnnnnnnnnnnnnnnnnnnnnnnnnnnnnnnnnnnnnnnnnnnnnnnnnnnnnnnnnnnnnnnnnnnnnnnnnnnnnnnnnnnnnnnnnnnnnnnnnnnnnnnnnnnnnnnnnnnnnnnnnnnnnnnnnnnnnnnnnnnnnnnnnnnnnnnnnnnnnnnnnnnnnnnnnnnnnnnnnnnnnnnnnnnnnnnnnnnnnnnnnnnnnnnnnnnnnnnnnnnnnnnnnnnnnnnnnnnnnnnnnnnnnnnnnnnnnnnnnnnnnnnnnnnnnnnnnnnnnnnnnnnnnnnnnnnnnnnnnnnnnnnnnnnnnnnnnnnnnnnnnnnnnnnnnnnnnnnnnnnnnnnnnnnnnnnnnnnnnnnnnnnnnnnnnnnnnnnnnnnnnnnnnnnnnnnnnnnnnnnnnnnnnnnnnnnnnnnnnnnnnnnnnnnnnnnnnnnnnnnnnnnnnnnnnnnnnnnnnnnnnnnnnnnnnnnnnnnnnnnnnnnnnnnnnnnnnnnnnnnnnnnnnnnnnnnnnnnnnnnnnnnnnnnnnnnnnnnnnnnnnnnnnnnnnnnnnnnnnnnnnnnnnnnnnnnnnnnnnnnnnnnnnnnnnnnnnnnnnnnnnnnnnnnnnnnnnnnnnnnnnnnnnnnnnnnnnnnnnnnnnnnnnnnnnnnnnnnnnnnnnnnnnnnnnnnnnnnnnnnnnnnnnnnnnnnnnnnnnnnnnnnnnnnnnnnnnnnnnnnnnnnnnnnnnnnnnnnnnnnnnnnnnnnnnnnnnnnnnnnnnnnnnnnnnnnnnnnnnnnnnnnnnnnnnnnnnnnnnnnnnnnnnnnnnnnnnnnnnnnnnnnnnnnnnnnnnnnnnnnnnnnnnnnnnnnnnnnnnnnnnnnnnnnnnnnnnnnnnnnnnnnnnnnnnnnnnnnnnnnnnnnnnnnnnnnnnnnnnnnnnnnnnnnnnnnnnnnnnnnnnnnnnnnnnnnnnnnnnnnnnnnnnnnnnnnnnnnnnnnnnnnnnnnnnnnnnnnnnnnnnnnnnnnnnnnnnnnnnnnnnnnnnnnnnnnnnnnnnnnnnnnnnnnnnnnnnnnnnnnnnnnnnnnnnnnnnnnnnnnnnnnnnnnnnnnnnnnnnnnnnnnnnnnnnnnnnnnnnnnnnnnnnnnnnnnnnnnnnnnnnnnnnnnnnnnnnnnnnnnnnnnnnnnnnnnnnnnnnnnnnnnnnnnnnnnnnnnnnnnnnnnnnnnnnnnnnnnnnnnnnnnnnnnnnnnnnnnnnnnnnnnnnnnnnnnnnnnnnnnnnnnnnnnnnnnnnnnnnnnnnnnnnnnnnnnnnnnnnnnnnnnnnnnnnnnnnnnnnnnnnnnnnnnnnnnnnnnnnnnnnnnnnnnnnnnnnnnnnnnnnnnnnnnnnnnnnnnnnnnnnnnnnnnnnnnnnnnnnnnnnnnnnnnnnnnnnnnnnnnnnnnnnnnnnnnnnnnnnnnnnnnnnnnnnnnnnnnnnnnnnnnnnnnnnnnnnnnnnnnnnnnnnnnnnnnnnnnnnnnnnnnnnnnnnnnnnnnnnnnnnnnnnnnnnnnnnnnnnnnnnnnnnnnnnnnnnnnnnnnnnnnnnnnnnnnnnnnnnnnnnnnnnnnnnnnnnnnnnnnnnnnnnnnnnnnnnnnnnnnnnnnnnnnnnnnnnnnnnnnnnnnnnnnnnnnnnnnnnnnnnnnnnnnnnnnnnnnnnnnnnnnnnnnnnnnnnnnnnnnnnnnnnnnnnnnnnnnnnnnnnnnnnnnnnnnnnnnnnnnnnnnnnnnnnnnnnnnnnnnnnnnnnnnnnnnnnnnnnnnnnnnnnnnnnnnnnnnnnnnnnnnnnnnnnnnnnnnnnnnnnnnnnnnnnnnnnnnnnnnnnnnnnnnnnnnnnnnnnnnnnnnnnnnnnnnnnnnnnnnnnnnnnnnnnnnnnnnnnnnnnnnnnnnnnnnnnnnnnnnnnnnnnnnnnnnnnnnnnnnnnnnnnnnnnnnnnnnnnnnnnnnnnnnnnnnnnnnnnnnnnnnnnnnnnnnnnnnnnnnnnnnnnnnnnnnnnnnnnnnnnnnnnnnnnnnnnnnnnnnnnnnnnnnnnnnnnnnnnnnnnnnnnnnnnnnnnnnnnnnnnnnnnnnnnnnnnnnnnnnnnnnnnnnnnnnnnnnnnnnnnnnnnnnnnnnnnnnnnnnnnnnnnnnnnnnnnnnnnnnnnnnnnnnnnnnnnnnnnnnnnnnnnnnnnnnnnnnnnnnnnnnnnnnnnnnnnnnnnnnnnnnnnnnnnnnnnnnnnnnnnnnnnnnnnnnnnnnnnnnnnnnnnnnnnnnnnnnnnnnnnnnnnnnnnnnnnnnnnnnnnnnnnnnnnnnnnnnnnnnnnnnnnnnnnnnnnnnnnnnnnnnnnnnnnnnnnnnnnnnnnnnnnnnnnnnnnnnnnnnnnnnnnnnnnnnnnnnnnnnnnnnnnnnnnnnnnnnnnnnnnnnnnnnnnnnnnnnnnnnnnnnnnnnnnnnnnnnnnnnnnnnnnnnnnnnnnnnnnnnnnnnnnnnnnnnnnnnnnnnnnnnnnnnnnnnnnnnnnnnnnnnnnnnnnnnnnnnnnnnnnnnnnnnnnnnnnnnnnnnnnnnnnnnnnnnnnnnnnnnnnnnnnnnnnnnnnnnnnnnnnnnnnnnnnnnnnnnnnnnnnnnnnnnnnnnnnnnnnnnnnnnnnnnnnnnnnnnnnnnnnnnnnnnnnnnnnnnnnnnnnnnnnnnnnnnnnnnnnnnnnnnnnnnnnnnnnnnnnnnnnnnnnnnnnnnnnnnnnnnnnnnnnnnnnnnnnnnnnnnnnnnnnnnnnnnnnnnnnnnnnnnnnnnnnnnnnnnnnnnnnnnnnnnnnnnnnnnnnnnnnnnnnnnnnnnnnnnnnnnnnnnnnnnnnnnnnnnnnnnnnnnnnnnnnnnnnnnnnnnnnnnnnnnnnnnnnnnnnnnnnnnnnnnnnnnnnnnnnnnnnnnnnnnnnnnnnnnnnnnnnnnnnnnnnnnnnnnnnnnnnnnnnnnnnnnnnnnnnnnnnnnnnnnnnnnnnnnnnnnnnnnnnnnnnnnnnnnnnnnnnnnnnnnnnnnnnnnnnnnnnnnnnnnnnnnnnnnnnnnnnnnnnnnnnnnnnnnnnnnnnnnnnnnnnnnnnnnnnnnnnnnnnnnnnnnnnnnnnnnnnnnnnnnnnnnnnnnnnnnnnnnnnnnnnnnnnnnnnnnnnnnnnnnnnnnnnnnnnnnnnnnnnnnnnnnnnnnnnnnnnnnnnnnnnnnnnnnnnnnnnnnnnnnnnnnnnnnnnnnnnnnnnnnnnnnnnnnnnnnnnnnnnnnnnnnnnnnnnnnnnnnnnnnnnnnnnnnnnnnnnnnnnnnnnnnnnnnnnnnnnnnnnnnnnnnnnnnnnnnnnnnnnnnnnnnnnnnnnnnnnnnnnnnnnnnnnnnnnnnnnnnnnnnnnnnnnnnnnnnnnnnnnnnnnnnnnnnnnnnnnnnnnnnnnnnnnnnnnnnnnnnnnnnnnnnnnnnnnnnnnnnnnnnnnnnnnnnnnnnnnnnnnnnnnnnnnnnnnnnnnnnnnnnnnnnnnnnnnnnnnnnnnnnnnnnnnnnnnnnnnnnnnnnnnnnnnnnnnnnnnnnnnnnnnnnnnnnnnnnnnnnnnnnnnnnnnnnnnnnnnnnnnnnnnnnnnnnnnnnnnnnnnnnnnnnnnnnnnnnnnnnnnnnnnnnnnnnnnnnnnnnnnnnnnnnnnnnnnnnnnnnnnnnnnnnnnnnnnnnnnnnnnnnnnnnnnnnnnnnnnnnnnnnnnnnnnnnnnnnnnnnnnnnnnnnnnnnnnnnnnnnnnnnnnnnnnnnnnnnnnnnnnnnnnnnnnnnnnnnnnnnnnnnnnnnnnnnnnnnnnnnnnnnnnnnnnnnnnnnnnnnnnnnnnnnnnnnnnnnnnnnnnnnnnnnnnnnnnnnnnnnnnnnnnnnnnnnnnnnnnnnnnnnnnnnnnnnnnnnnnnnnnnnnnnnnnnnnnnnnnnnnnnnnnnnnnnnnnnnnnnnnnnnnnnnnnnnnnnnnnnnnnnnnnnnnnnnnnnnnnnnnnnnnnnnnnnnnnnnnnnnnnnnnnnnnnnnnnnnnnnnnnnnnnnnnnnnnnnnnnnnnnnnnnnnnnnnnnnnnnnnnnnnnnnnnnnnnnnnnnnnnnnnnnnnnnnnnnnnnnnnnnnnnnnnnnnnnnnnnnnnnnnnnnnnnnnnnnnnnnnnnnnnnnnnnnnnnnnnnnnnnnnnnnnnnnnnnnnnnnnnnnnnnnnnnnnnnnnnnnnnnnnnnnnnnnnnnnnnnnnnnnnnnnnnnnnnnnnnnnnnnnnnnnnnnnnnnnnnnnnnnnnnnnnnnnnnnnnnnnnnnnnnnnnnnnnnnnnnnnnnnnnnnnnnnnnnnnnnnnnnnnnnnnnnnnnnnnnnnnnnnnnnnnnnnnnnnnnnnnnnnnnnnnnnnnnnnnnnnnnnnnnnnnnnnnnnnnnnnnnnnnnnnnnnnnnnnnnnnnnnnnnnnnnnnnnnnnnnnnnnnnnnnnnnnnnnnnnnnnnnnnnnnnnnnnnnnnnnnnnnnnnnnnnnnnnnnnnnnnnnnnnnnnnnnnnnnnnnnnnnnnnnnnnnnnnnnnnnnnnnnnnnnnnnnnnnnnnnnnnnnnnnnnnnnnnnnnnnnnnnnnnnnnnnnnnnnnnnnnnnnnnnnnnnnnnnnnnnnnnnnnnnnnnnnnnnnnnnnnnnnnnnnnnnnnnnnnnnnnnnnnnnnnnnnnnnnnnnnnnnnnnnnnnnnnnnnnnnnnnnnnnnnnnnnnnnnnnnnnnnnnnnnnnnnnnnnnnnnnnnnnnnnnnnnnnnnnnnnnnnnnnnnnnnnnnnnnnnnnnnnnnnnnnnnnnnnnnnnnnnnnnnnnnnnnnnnnnnnnnnnnnnnnnnnnnnnnnnnnnnnnnnnnnnnnnnnnnnnnnnnnnnnnnnnnnnnnnnnnnnnnnnnnnnnnnnnnnnnnnnnnnnnnnnnnnnnnnnnnnnnnnnnnnnnnnnnnnnnnnnnnnnnnnnnnnnnnnnnnnnnnnnnnnnnnnnnnnnnnnnnnnnnnnnnnnnnnnnnnnnnnnnnnnnnnnnnnnnnnnnnnnnnnnnnnnnnnnnnnnnnnnnnnnnnnnnnnnnnnnnnnnnnnnnnnnnnnnnnnnnnnnnnnnnnnnnnnnnnnnnnnnnnnnnnnnnnnnnnnnnnnnnnnnnnnnnnnnnnnnnnnnnnnnnnnnnnnnnnnnnnnnnnnnnnnnnnnnnnnnnnnnnnnnnnnnnnnnnnnnnnnnnnnnnnnnnnnnnnnnnnnnnnnnnnnnnnnnnnnnnnnnnnnnnnnnnnnnnnnnnnnnnnnnnnnnnnnnnnnnnnnnnnnnnnnnnnnnnnnnnnnnnnnnnnnnnnnnnnnnnnnnnnnnnnnnnnnnnnnnnnnnnnnnnnnnnnnnnnnnnnnnnnnnnnnnnnnnnnnnnnnnnnnnnnnnnnnnnnnnnnnnnnnnnnnnnnnnnnnnnnnnnnnnnnnnnnnnnnnnnnnnnnnnnnnnnnnnnnnnnnnnnnnnnnnnnnnnnnnnnnnnnnnnnnnnnnnnnnnnnnnnnnnnnnnnnnnnnnnnnnnnnnnnnnnnnnnnnnnnnnnnnnnnnnnnnnnnnnnnnnnnnnnnnnnnnnnnnnnnnnnnnnnnnnnnnnnnnnnnnnnnnnnnnnnnnnnnnnnnnnnnnnnnnnnnnnnnnnnnnnnnnnnnnnnnnnnnnnnnnnnnnnnnnnnnnnnnnnnnnnnnnnnnnnnnnnnnnnnnnnnnnnnnnnnnnnnnnnnnnnnnnnnnnnnnnnnnnnnnnnnnnnnnnnnnnnnnnnnnnnnnnnnnnnnnnnnnnnnnnnnnnnnnnnnnnnnnnnnnnnnnnnnnnnnnnnnnnnnnnnnnnnnnnnnnnnnnnnnnnnnnnnnnnnnnnnnnnnnnnnnnnnnnnnnnnnnnnnnnnnnnnnnnnnnnnnnnnnnnnnnnnnnnnnnnnnnnnnnnnnnnnnnnnnnnnnnnnnnnnnnnnnnnnnnnnnnnnnnnnnnnnnnnnnnnnnnnnnnnnnnnnnnnnnnnnnnnnnnnnnnnnnnnnnnnnnnnnnnnnnnnnnnnnnnnnnnnnnnnnnnnnnnnnnnnnnnnnnnnnnnnnnnnnnnnnnnnnnnnnnnnnnnnnnnnnnnnnnnnnnnnnnnnnnnnnnnnnnnnnnnnnnnnnnnnnnnnnnnnnnnnnnnnnnnnnnnnnnnnnnnnnnnnnnnnnnnnnnnnnnnnnnnnnnnnnnnnnnnnnnnnnnnnnnnnnnnnnnnnnnnnnnnnnnnnnnnnnnnnnnnnnnnnnnnnnnnnnnnnnnnnnnnnnnnnnnnnnnnnnnnnnnnnnnnnnnnnnnnnnnnnnnnnnnnnnnnnnnnnnnnnnnnnnnnnnnnnnnnnnnnnnnnnnnnnnnnnnnnnnnnnnnnnnnnnnnnnnnnnnnnnnnnnnnnnnnnnnnnnnnnnnnnnnnnnnnnnnnnnnnnnnnnnnnnnnnnnnnnnnnnnnnnnnnnnnnnnnnnnnnnnnnnnnnnnnnnnnnnnnnnnnnnnnnnnnnnnnnnnnnnnnnnnnnnnnnnnnnnnnnnnnnnnnnnnnnnnnnnnnnnnnnnnnnnnnnnnnnnnnnnnnnnnnnnnnnnnnnnnnnnnnnnnnnnnnnnnnnnnnnnnnnnnnnnnnnnnnnnnnnnnnnnnnnnnnnnnnnnnnnnnnnnnnnnnnnnnnnnnnnnnnnnnnnnnnnnnnnnnnnnnnnnnnnnnnnnnnnnnnnnnnnnnnnnnnnnnnnnnnnnnnnnnnnnnnnnnnnnnnnnnnnnnnnnnnnnnnnnnnnnnnnnnnnnnnnnnnnnnnnnnnnnnnnnnnnnnnnnnnnnnnnnnnnnnnnnnnnnnnnnnnnnnnnnnnnnnnnnnnnnnnnnnnnnnnnnnnnnnnnnnnnnnnnnnnnnnnnnnnnnnnnnnnnnnnnnnnnnnnnnnnnnnnnnnnnnnnnnnnnnnnnnnnnnnnnnnnnnnnnnnnnnnnnnnnnnnnnnnnnnnnnnnnnnnnnnnnnnnnnnnnnnnnnnnnnnnnnnnnnnnnnnnnnnnnnnnnnnnnnnnnnnnnnnnnnnnnnnnnnnnnnnnnnnnnnnnnnnnnnnnnnnnnnnnnnnnnnnnnnnnnnnnnnnnnnnnnnnnnnnnnnnnnnnnnnnnnnnnnnnnnnnnnnnnnnnnnnnnnnnnnnnnnnnnnnnnnnnnnnnnnnnnnnnnnnnnnnnnnnnnnnnnnnnnnnnnnnnnnnnnnnnnnnnnnnnnnnnnnnnnnnnnnnnnnnnnnnnnnnnnnnnnnnnnnnnnnnnnnnnnnnnnnnnnnnnnnnnnnnnnnnnnnnnnnnnnnnnnnnnnnnnnnnnnnnnnnnnnnnnnnnnnnnnnnnnnnnnnnnnnnnnnnnnnnnnnnnnnnnnnnnnnnnnnnnnnnnnnnnnnnnnnnnnnnnnnnnnnnnnnnnnnnnnnnnnnnnnnnnnnnnnnnnnnnnnnnnnnnnnnnnnnnnnnnnnnnnnnnnnnnnnnnnnnnnnnnnnnnnnnnnnnnnnnnnnnnnnnnnnnnnnnnnnnnnnnnnnnnnnnnnnnnnnnnnnnnnnnnnnnnnnnnnnnnnnnnnnnnnnnnnnnnnnnnnnnnnnnnnnnnnnnnnnnnnnnnnnnnnnnnnnnnnnnnnnnnnnnnnnnnnnnnnnnnnnnnnnnnnnnnnnnnnnnnnnnnnnnnnnnnnnnnnnnnnnnnnnnnnnnnnnnnnnnnnnnnnnnnnnnnnnnnnnnnnnnnnnnnnnnnnnnnnnnnnnnnnnnnnnnnnnnnnnnnnnnnnnnnnnnnnnnnnnnnnnnnnnnnnnnnnnnnnnnnnnnnnnnnnnnnnnnnnnnnnnnnnnnnnnnnnnnnnnnnnnnnnnnnnnnnnnnnnnnnnnnnnnnnnnnnnnnnnnnnnnnnnnnnnnnnnnnnnnnnnnnnnnnnnnnnnnnnnnnnnnnnnnnnnnnnnnnnnnnnnnnnnnnnnnnnnnnnnnnnnnnnnnnnnnnnnnnnnnnnnnnnnnnnnnnnnnnnnnnnnnnnnnnnnnnnnnnnnnnnnnnnnnnnnnnnnnnnnnnnnnnnnnnnnnnnnnnnnnnnnnnnnnnnnnnnnnnnnnnnnnnnnnnnnnnnnnnnnnnnnnnnnnnnnnnnnnnnnnnnnnnnnnnnnnnnnnnnnnnnnnnnnnnnnnnnnnnnnnnnnnnnnnnnnnnnnnnnnnnnnnnnnnnnnnnnnnnnnnnnnnnnnnnnnnnnnnnnnnnnnnnnnnnnnnnnnnnnnnnnnnnnnnnnnnnnnnnnnnnnnnnnnnnnnnnnnnnnnnnnnnnnnnnnnnnnnnnnnnnnnnnnnnnnnnnnnnnnnnnnnnnnnnnnnnnnnnnnnnnnnnnnnnnnnnnnnnnnnnnnnnnnnnnnnnnnnnnnnnnnnnnnnnnnnnnnnnnnnnnnnnnnnnnnnnnnnnnnnnnnnnnnnnnnnnnnnnnnnnnnnnnnnnnnnnnnnnnnnnnnnnnnnnnnnnnnnnnnnnnnnnnnnnnnnnnnnnnnnnnnnnnnnnnnnnnnnnnnnnnnnnnnnnnnnnnnnnnnnnnnnnnnnnnnnnnnnnnnnnnnnnnnnnnnnnnnnnnnnnnnnnnnnnnnnnnnnnnnnnnnnnnnnnnnnnnnnnnnnnnnnnnnnnnnnnnnnnnnnnnnnnnnnnnnnnnnnnnnnnnnnnnnnnnnnnnnnnnnnnnnnnnnnnnnnnnnnnnnnnnnnnnnnnnnnnnnnnnnnnnnnnnnnnnnnnnnnnnnnnnnnnnnnnnnnnnnnnnnnnnnnnnnnnnnnnnnnnnnnnnnnnnnnnnnnnnnnnnnnnnnnnnnnnnnnnnnnnnnnnnnnnnnnnnnnnnnnnnnnnnnnnnnnnnnnnnnnnnnnnnnnnnnnnnnnnnnnnnnnnnnnnnnnnnnnnnnnnnnnnnnnnnnnnnnnnnnnnnnnnnnnnnnnnnnnnnnnnnnnnnnnnnnnnnnnnnnnnnnnnnnnnnnnnnnnnnnnnnnnnnnnnnnnnnnnnnnnnnnnnnnnnnnnnnnnnnnnnnnnnnnnnnnnnnnnnnnnnnnnnnnnnnnnnnnnnnnnnnnnnnnnnnnnnnnnnnnnnnnnnnnnnnnnnnnnnnnnnnnnnnnnnnnnnnnnnnnnnnnnnnnnnnnnnnnnnnnnnnnnnnnnnnnnnnnnnnnnnnnnnnnnnnnnnnnnnnnnnnnnnnnnnnnnnnnnnnnnnnnnnnnnnnnnnnnnnnnnnnnnnnnnnnnnnnnnnnnnnnnnnnnnnnnnnnnnnnnnnnnnnnnnnnnnnnnnnnnnnnnnnnnnnnnnnnnnnnnnnnnnnnnnnnnnnnnnnnnnnnnnnnnnnnnnnnnnnnnnnnnnnnnnnnnnnnnnnnnnnnnnnnnnnnnnnnnnnnnnnnnnnnnnnnnnnnnnnnnnnnnnnnnnnnnnnnnnnnnnnnnnnnnnnnnnnnnnnnnnnnnnnnnnnnnnnnnnnnnnnnnnnnnnnnnnnnnnnnnnnnnnnnnnnnnnnnnnnnnnnnnnnnnnnnnnnnnnnnnnnnnnnnnnnnnnnnnnnnnnnnnnnnnnnnnnnnnnnnnnnnnnnnnnnnnnnnnnnnnnnnnnnnnnnnnnnnnnnnnnnnnnnnnnnnnnnnnnnnnnnnnnnnnnnnnnnnnnnnnnnnnnnnnnnnnnnnnnnnnnnnnnnnnnnnnnnnnnnnnnnnnnnnnnnnnnnnnnnnnnnnnnnnnnnnnnnnnnnnnnnnnnnnnnnnnnnnnnnnnnnnnnnnnnnnnnnnnnnnnnnnnnnnnnnnnnnnnnnnnnnnnnnnnnnnnnnnnnnnnnnnnnnnnnnnnnnnnnnnnnnnnnnnnnnnnnnnnnnnnnnnnnnnnnnnnnnnnnnnnnnnnnnnnnnnnnnnnnnnnnnnnnnnnnnnnnnnnnnnnnnnnnnnnnnnnnnnnnnnnnnnnnnnnnnnnnnnnnnnnnnnnnnnnnnnnnnnnnnnnnnnnnnnnnnnnnnnnnnnnnnnnnnnnnnnnnnnnnnnnnnnnnnnnnnnnnnnnnnnnnnnnnnnnnnnnnnnnnnnnnnnnnnnnnnnnnnnnnnnnnnnnnnnnnnnnnnnnnnnnnnnnnnnnnnnnnnnnnnnnnnnnnnnnnnnnnnnnnnnnnnnnnnnnnnnnnnnnnnnnnnnnnnnnnnnnnnnnnnnnnnnnnnnnnnnnnnnnnnnnnnnnnnnnnnnnnnnnnnnnnnnnnnnnnnnnnnnnnnnnnnnnnnnnnnnnnnnnnnnnnnnnnnnnnnnnnnnnnnnnnnnnnnnnnnnnnnnnnnnnnnnnnnnnnnnnnnnnnnnnnnnnnnnnnnnnnnnnnnnnnnnnnnnnnnnnnnnnnnnnnnnnnnnnnnnnnnnnnnnnnnnnnnnnnnnnnnnnnnnnnnnnnnnnnnnnnnnnnnnnnnnnnnnnnnnnnnnnnnnnnnnnnnnnnnnnnnnnnnnnnnnnnnnnnnnnnnnnnnnnnnnnnnnnnnnnnnnnnnnnnnnnnnnnnnnnnnnnnnnnnnnnnnnnnnnnnnnnnnnnnnnnnnnnnnnnnnnnnnnnnnnnnnnnnnnnnnnnnnnnnnnnnnnnnnnnnnnnnnnnnnnnnnnnnnnnnnnnnnnnnnnnnnnnnnnnnnnnnnnnnnnnnnnnnnnnnnnnnnnnnnnnnnnnnnnnnnnnnnnnnnnnnnnnnnnnnnnnnnnnnnnnnnnnnnnnnnnnnnnnnnnnnnnnnnnnnnnnnnnnnnnnnnnnnnnnnnnnnnnnnnnnnnnnnnnnnnnnnnnnnnnnnnnnnnnnnnnnnnnnnnnnnnnnnnnnnnnnnnnnnnnnnnnnnnnnnnnnnnnnnnnnnnnnnnnnnnnnnnnnnnnnnnnnnnnnnnnnnnnnnnnnnnnnnnnnnnnnnnnnnnnnnnnnnnnnnnnnnnnnnnnnnnnnnnnnnnnnnnnnnnnnnnnnnnnnnnnnnnnnnnnnnnnnnnnnnnnnnnnnnnnnnnnnnnnnnnnnnnnnnnnnnnnnnnnnnnnnnnnnnnnnnnnnnnnnnnnnnnnnnnnnnnnnnnnnnnnnnnnnnnnnnnnnnnnnnnnnnnnnnnnnnnnnnnnnnnnnnnnnnnnnnnnnnnnnnnnnnnnnnnnnnnnnnnnnnnnnnnnnnnnnnnnnnnnnnnnnnnnnnnnnnnnnnnnnnnnnnnnnnnnnnnnnnnnnnnnnnnnnnnnnnnnnnnnnnnnnnnnnnnnnnnnnnnnnnnnnnnnnnnnnnnnnnnnnnnnnnnnnnnnnnnnnnnnnnnnnnnnnnnnnnnnnnnnnnnnnnnnnnnnnnnnnnnnnnnnnnnnnnnnnnnnnnnnnnnnnnnnnnnnnnnnnnnnnnnnnnnnnnnnnnnnnnnnnnnnnnnnnnnnnnnnnnnnnnnnnnnnnnnnnnnnnnnnnnnnnnnnnnnnnnnnnnnnnnnnnnnnnnnnnnnnnnnnnnnnnnnnnnnnnnnnnnnnnnnnnnnnnnnnnnnnnnnnnnnnnnnnnnnnnnnnnnnnnnnnnnnnnnnnnnnnnnnnnnnnnnnnnnnnnnnnnnnnnnnnnnnnnnnnnnnnnnnnnnnnnnnnnnnnnnnnnnnnnnnnnnnnnnnnnnnnnnnnnnnnnnnnnnnnnnnnnnnnnnnnnnnnnnnnnnnnnnnnnnnnnnnnnnnnnnnnnnnnnnnnnnnnnnnnnnnnnnnnnnnnnnnnnnnnnnnnnnnnnnnnnnnnnnnnnnnnnnnnnnnnnnnnnnnnnnnnnnnnnnnnnnnnnnnnnnnnnnnnnnnnnnnnnnnnnnnnnnnnnnnnnnnnnnnnnnnnnnnnnnnnnnnnnnnnnnnnnnnnnnnnnnnnnnnnnnnnnnnnnnnnnnnnnnnnnnnnnnnnnnnnnnnnnnnnnnnnnnnnnnnnnnnnnnnnnnnnnnnnnnnnnnnnnnnnnnnnnnnnnnnnnnnnnnnnnnnnnnnnnnnnnnnnnnnnnnnnnnnnnnnnnnnnnnnnnnnnnnnnnnnnnnnnnnnnnnnnnnnnnnnnnnnnnnnnnnnnnnnnnnnnnnnnnnnnnnnnnnnnnnnnnnnnnnnnnnnnnnnnnnnnnnnnnnnnnnnnnnnnnnnnnnnnnnnnnnnnnnnnnnnnnnnnnnnnnnnnnnnnnnnnnnnnnnnnnnnnnnnnnnnnnnnnnnnnnnnnnnnnnnnnnnnnnnnnnnnnnnnnnnnnnnnnnnnnnnnnnnnnnnnnnnnnnnnnnnnnnnnnnnnnnnnnnnnnnnnnnnnnnnnnnnnnnnnnnnnnnnnnnnnnnnnnnnnnnnnnnnnnnnnnnnnnnnnnnnnnnnnnnnnnnnnnnnnnnnnnnnnnnnnnnnnnnnnnnnnnnnnnnnnnnnnnnnnnnnnnnnnnnnnnnnnnnnnnnnnnnnnnnnnnnnnnnnnnnnnnnnnnnnnnnnnnnnnnnnnnnnnnnnnnnnnnnnnnnnnnnnnnnnnnnnnnnnnnnnnnnnnnnnnnnnnnnnnnnnnnnnnnnnnnnnnnnnnnnnnnnnnnnnnnnnnnnnnnnnnnnnnnnnnnnnnnnnnnnnnnnnnnnnnnnnnnnnnnnnnnnnnnnnnnnnnnnnnnnnnnnnnnnnnnnnnnnnnnnnnnnnnnnnnnnnnnnnnnnnnnnnnnnnnnnnnnnnnnnnnnnnnnnnnnnnnnnnnnnnnnnnnnnnnnnnnnnnnnnnnnnnnnnnnnnnnnnnnnnnnnnnnnnnnnnnnnnnnnnnnnnnnnnnnnnnnnnnnnnnnnnnnnnnnnnnnnnnnnnnnnnnnnnnnnnnnnnnnnnnnnnnnnnnnnnnnnnnnnnnnnnnnnnnnnnnnnnnnnnnnnnnnnnnnnnnnnnnnnnnnnnnnnnnnnnnnnnnnnnnnnnnnnnnnnnnnnnnnnnnnnnnnnnnnnnnnnnnnnnnnnnnnnnnnnnnnnnnnnnnnnnnnnnnnnnnnnnnnnnnnnnnnnnnnnnnnnnnnnnnnnnnnnnnnnnnnnnnnnnnnnnnnnnnnnnnnnnnnnnnnnnnnnnnnnnnnnnnnnnnnnnnnnnnnnnnnnnnnnnnnnnnnnnnnnnnnnnnnnnnnnnnnnnnnnnnnnnnnnnnnnnnnnnnnnnnnnnnnnnnnnnnnnnnnnnnnnnnnnnnnnnnnnnnnnnnnnnnnnnnnnnnnnnnnnnnnnnnnnnnnnnnnnnnnnnnnnnnnnnnnnnnnnnnnnnnnnnnnnnnnnnnnnnnnnnnnnnnnnnnnnnnnnnnnnnnnnnnnnnnnnnnnnnnnnnnnnnnnnnnnnnnnnnnnnnnnnnnnnnnnnnnnnnnnnnnnnnnnnnnnnnnnnnnnnnnnnnnnnnnnnnnnnnnnnnnnnnnnnnnnnnnnnnnnnnnnnnnnnnnnnnnnnnnnnnnnnnnnnnnnnnnnnnnnnnnnnnnnnnnnnnnnnnnnnnnnnnnnnnnnnnnnnnnnnnnnnnnnnnnnnnnnnnnnnnnnnnnnnnnnnnnnnnnnnnnnnnnnnnnnnnnnnnnnnnnnnnnnnnnnnnnnnnnnnnnnnnnnnnnnnnnnnnnnnnnnnnnnnnnnnnnnnnnnnnnnnnnnnnnnnnnnnnnnnnnnnnnnnnnnnnnnnnnnnnnnnnnnnnnnnnnnnnnnnnnnnnnnnnnnnnnnnnnnnnnnnnnnnnnnnnnnnnnnnnnnnnnnnnnnnnnnnnnnnnnnnnnnnnnnnnnnnnnnnnnnnnnnnnnnnnnnnnnnnnnnnnnnnnnnnnnnnnnnnnnnnnnnnnnnnnnnnnnnnnnnnnnnnnnnnnnnnnnnnnnnnnnnnnnnnnnnnnnnnnnnnnnnnnnnnnnnnnnnnnnnnnnnnnnnnnnnnnnnnnnnnnnnnnnnnnnnnnnnnnnnnnnnnnnnnnnnnnnnnnnnnnnnnnnnnnnnnnnnnnnnnnnnnnnnnnnnnnnnnnnnnnnnnnnnnnnnnnnnnnnnnnnnnnnnnnnnnnnnnnnnnnnnnnnnnnnnnnnnnnnnnnnnnnnnnnnnnnnnnnnnnnnnnnnnnnnnnnnnnnnnnnnnnnnnnnnnnnnnnnnnnnnnnnnnnnnnnnnnnnnnnnnnnnnnnnnnnnnnnnnnnnnnnnnnnnnnnnnnnnnnnnnnnnnnnnnnnnnnnnnnnnnnnnnnnnnnnnnnnnnnnnnnnnnnnnnnnnnnnnnnnnnnnnnnnnnnnnnnnnnnnnnnnnnnnnnnnnnnnnnnnnnnnnnnnnnnnnnnnnnnnnnnnnnnnnnnnnnnnnnnnnnnnnnnnnnnnnnnnnnnnnnnnnnnnnnnnnnnnnnnnnnnnnnnnnnnnnnnnnnnnnnnnnnnnnnnnnnnnnnnnnnnnnnnnnnnnnnnnnnnnnnnnnnnnnnnnnnnnnnnnnnnnnnnnnnnnnnnnnnnnnnnnnnnnnnnnnnnnnnnnnnnnnnnnnnnnnnnnnnnnnnnnnnnnnnnnnnnnnnnnnnnnnnnnnnnnnnnnnnnnnnnnnnnnnnnnnnnnnnnnnnnnnnnnnnnnnnnnnnnnnnnnnnnnnnnnnnnnnnnnnnnnnnnnnnnnnnnnnnnnnnnnnnnnnnnnnnnnnnnnnnnnnnnnnnnnnnnnnnnnnnnnnnnnnnnnnnnnnnnnnnnnnnnnnnnnnnnnnnnnnnnnnnnnnnnnnnnnnnnnnnnnnnnnnnnnnnnnnnnnnnnnnnnnnnnnnnnnnnnnnnnnnnnnnnnnnnnnnnnnnnnnnnnnnnnnnnnnnnnnnnnnnnnnnnnnnnnnnnnnnnnnnnnnnnnnnnnnnnnnnnnnnnnnnnnnnnnnnnnnnnnnnnnnnnnnnnnnnnnnnnnnnnnnnnnnnnnnnnnnnnnnnnnnnnnnnnnnnnnnnnnnnnnnnnnnnnnnnnnnnnnnnnnnnnnnnnnnnnnnnnnnnnnnnnnnnnnnnnnnnnnnnnnnnnnnnnnnnnnnnnnnnnnnnnnnnnnnnnnnnnnnnnnnnnnnnnnnnnnnnnnnnnnnnnnnnnnnnnnnnnnnnnnnnnnnnnnnnnnnnnnnnnnnnnnnnnnnnnnnnnnnnnnnnnnnnnnnnnnnnnnnnnnnnnnnnnnnnnnnnnnnnnnnnnnnnnnnnnnnnnnnnnnnnnnnnnnnnnnnnnnnnnnnnnnnnnnnnnnnnnnnnnnnnnnnnnnnnnnnnnnnnnnnnnnnnnnnnnnnnnnnnnnnnnnnnnnnnnnnnnnnnnnnnnnnnnnnnnnnnnnnnnnnnnnnnnnnnnnnnnnnnnnnnnnnnnnnnnnnnnnnnnnnnnnnnnnnnnnnnnnnnnnnnnnnnnnnnnnnnnnnnnnnnnnnnnnnnnnnnnnnnnnnnnnnnnnnnnnnnnnnnnnnnnnnnnnnnnnnnnnnnnnnnnnnnnnnnnnnnnnnnnnnnnnnnnnnnnnnnnnnnnnnnnnnnnnnnnnnnnnnnnnnnnnnnnnnnnnnnnnnnnnnnnnnnnnnnnnnnnnnnnnnnnnnnnnnnnnnnnnnnnnnnnnnnnnnnnnnnnnnnnnnnnnnnnnnnnnnnnnnnnnnnnnnnnnnnnnnnnnnnnnnnnnnnnnnnnnnnnnnnnnnnnnnnnnnnnnnnnnnnnnnnnnnnnnnnnnnnnnnnnnnnnnnnnnnnnnnnnnnnnnnnnnnnnnnnnnnnnnnnnnnnnnnnnnnnnnnnnnnnnnnnnnnnnnnnnnnnnnnnnnnnnnnnnnnnnnnnnnnnnnnnnnnnnnnnnnnnnnnnnnnnnnnnnnnnnnnnnnnnnnnnnnnnnnnnnnnnnnnnnnnnnnnnnnnnnnnnnnnnnnnnnnnnnnnnnnnnnnnnnnnnnnnnnnnnnnnnnnnnnnnnnnnnnnnnnnnnnnnnnnnnnnnnnnnnnnnnnnnnnnnnnnnnnnnnnnnnnnnnnnnnnnnnnnnnnnnnnnnnnnnnnnnnnnnnnnnnnnnnnnnnnnnnnnnnnnnnnnnnnnnnnnnnnnnnnnnnnnnnnnnnnnnnnnnnnnnnnnnnnnnnnnnnnnnnnnnnnnnnnnnnnnnnnnnnnnnnnnnnnnnnnnnnnnnnnnnnnnnnnnnnnnnnnnnnnnnnnnnnnnnnnnnnnnnnnnnnnnnnnnnnnnnnnnnnnnnnnnnnnnnnnnnnnnnnnnnnnnnnnnnnnnnnnnnnnnnnnnnnnnnnnnnnnnnnnnnnnnnnnnnnnnnnnnnnnnnnnnnnnnnnnnnnnnnnnnnnnnnnnnnnnnnnnnnnnnnnnnnnnnnnnnnnnnnnnnnnnnnnnnnnnnnnnnnnnnnnnnnnnnnnnnnnnnnnnnnnnnnnnnnnnnnnnnnnnnnnnnnnnnnnnnnnnnnnnnnnnnnnnnnnnnnnnnnnnnnnnnnnnnnnnnnnnnnnnnnnnnnnnnnnnnnnnnnnnnnnnnnnnnnnnnnnnnnnnnnnnnnnnnnnnnnnnnnnnnnnnnnnnnnnnnnnnnnnnnnnnnnnnnnnnnnnnnnnnnnnnnnnnnnnnnnnnnnnnnnnnnnnnnnnnnnnnnnnnnnnnnnnnnnnnnnnnnnnnnnnnnnnnnnnnnnnnnnnnnnnnnnnnnnnnnnnnnnnnnnnnnnnnnnnnnnnnnnnnnnnnnnnnnnnnnnnnnnnnnnnnnnnnnnnnnnnnnnnnnnnnnnnnnnnnnnnnnnnnnnnnnnnnnnntccccgccggaagtgcggtcagaggctaatatatcatagctgtatagctaagacaagaaaatttcttaatttttcgattttcttgattttttcacagcttctttttgtcgggatgtatgcgccacagggacgatatattgttggggtgggttctacgacatgaacatctggagccccaagaagcgagacgagaaattgaatcacaggcgcgacaatcccgtcaaacgagtgctggtcaagcacccgggcgactggccgtggtcgcgctgcggcgggaggttctatttctggaatgatggttcgatcttgagcatggacaagaggctatgaaggtgtcgacatgccgaggggcgcatacatcccgacaaaaacccgtcgggacgtatgcgccacccgcgaaatcgatcgcaagattccctccgaatcggaacgccgcggaggcatcaaagcttctgcgcttagtcaacggcgcgccttgcagcctgtgaagtgtgggctaagcggacgcgataaccgttgtcgtggtcttcgggccttgcctttgccgcgtcccgggtgtataccttcgccatgattgtcctgtggtagctacgcagcggacggtccggtccccccggggcgcgacgggcctgccacccgcctcttgcccaggcaaggaggaagccgtggagtacaacctgctcgaagaaaagtggattcccgttctgtggaaagatgggcacagcggtcgcgtgggcattagtgaggcccttaggcaagcaggccggattcgccaaatcgcggccagcaacccaatggaccgcctggccatcctgcgtttcctgcttgcgttgctctattggtgcaaagggaatcccccggacgacaagaactcgatttcttcgtttccctctgattggttcaagaaactcgatgacaacaaagactgtttcaaccttcagggcgatgggaagcggttttaccaacgcaagcctaaccgacttgagaagaagctgtccgtcaactatctgatgcaagaagtgccgaccggcacaaacttctggcacttccggcatgggacagatttcagaaacggcttatgtccggcatgctgcgcaatgggcttgttgcgccttccgctctttgctacgtcggccgggcgcggcaagcccccgggcgtcaatcaaaaaccgccgatctacatcgtgccgatgggcgactgcctttccgaaaccctgcgcctctcatggcggaagacgtcggagatgaacctgggcacgcccacatgggaaaatccggacataagcctccctcaacacggcaatgttccattattgataggattaacgtgggtaccgcggcgcgtctggttagacactccggagacaccagagtccaactgcatcgcctgcgggcgcagggaggctctgatacgtcaatgtgtctttgcgggtattgggagcacaaagacaggcgaaggcagtctggcacgaatctggaacgacccgcacaccatcagcgaaggcgacgagattgtgaagcctttcagcgcgcttggcccggccgacgctgcggctgggaagtggacgaaggtcgtggcgggaatcctgtgcggggaaaagccgaaggggaacagtaagttgtgggtcgtcagctttgcgacagtgcagaacgacaaatacctggaagcagccgagcgggagattcaattcttggccgcgctcgacgacgtgaaggttcaggcgagtttgcaagaaatccaggcgtggcagaaggaaggctggaagctcgttggcagagccaaaccgcgagagacttcacgaaacagaggacaccttgaaattctctccgcagtcgccgctgttcgtccccaagccgaggcaacggtttccggaaaaatcgacgagatgatcgcagaaggcggtaaggcatgggaagaggcggcccaggaatatcgtccgttgatggccgccgtcgccaaatcgctttccccgggctacacaaccgcttccctccggaggcgacaagaaattgccgctgtaaagccggacatgcggccaaagagaaacaacaaagacgaagggggggacaagtgactccaacggagcagtacgtcgaagttctgactcgactgaaacccggtgagctcgggctcttgcgcaaccatgccgggcaagggctcgacgaatcggtagagggctttgaccttttcgcaggcctttggtggccgctgcgggcgcaaacccaacgggcgcctcgccgtgaggtggcctggcttgtcgccaaactctacgccctccggcccctcgagcattcaccccgcgagaccctcgctcgccagctcgggcgatcccggccgggcgagaaaacagcgcggcagcgtttcgagcaacgcttcgacaggatgctcacgctgccgcttgctgaaatcgaacccgccctacagtgggcaatcgacctcatagcttccaagcacctcgaactcgactgggtgcggctgacgaacgatctttccatctgggaacgcgaatccacccggctcaaatgggccgaggaatttttgaactgtccaagaggaggagagtcatgttgatccagattcacgccattcagaatcacagcccggccaacctgaaccgggatgacctgggcgcgcccaagacttgcttttttggcggagtcttgcgctcccgtatttccagccagtgccttaagcgcagcatccgcatgagtgaggagttcagacaattgctgggcggagttcgcacccgccagttggcgaaagagattgcggaaaaggtgacgggcaaagacgtcaggaagcgagcggagaacattctcaaagcctgcgggctggagcctaagaaagcaaaaaaacaggaaggagaagacgaacaggaaagtgctgagaggagcaagatgctggtttacaccacccaagaggcgattacacgcatggccgaactcctccagcagggcgacggaaaaacggacgaggccttggcagcggagttcggcaagctcatcagtgaatccgtcgccgtgccggacatggcgctgagcggcaggatgcttgaaacgggagtcctcaaagacacgacggttgaggcatcgcttcaagtcgcccatgccatttccacccatgaggcccggcccgaggtggactactatgtcgccgccgatgatgtccccggcgaggacgcgggcgcaggttacgtggatgaagccatgttcggttcggcatgtttctacaagtatttctccattcattgggaaacgctggtcaaaaacctgaagcccttcgggacgaatcacgaaaaactggcggcccataccgtcggcgccttcattcgcgccgcggccttggccaaccccacgggaaaacaaaatagttttgccgcgcacaaccctcctgacgggatgttggtggaagtcagaaacactcccatcagctacgccaacgccttcgccaaaccggcggctcctcagggcgaacgggacatcatctcgcagagcgtggcgcagcttgcccattatgtgaacgacatagatacgggatacggcaagccgacgaagcggttctggttctctccaaatctccgctatccgttgacggctaccaccacggagagcgaagacggaaaacagaaacagcgtgaggtcccgcttgccgacaaagatgttaagtctcttgacgaactgatagcggctgtactcaaggaaatcggttacgactggcaggaggccaagaaagtggtcctgaatccggaggtgccccatgagcgcaaagacgctgctacttcggcttgaaggtcctcttcaggcatggggcgatcagcaatccaagttcgtcattcggcgcacggccgaggcgccgaccaagtccggcgtcatcgggatgctttgcgcggcattgggcgtttcccggccagaggcccgcgaaggctggcttccaaggctggcccggctgcgcatgggcgtacgcgtcgatgcgccaggggtccgctggtgggattatcacacggtgggtgcggggatgccgatgcgtaccgccgaggggggaaccaagtccggagccatgctcacccgccgcgaatacctttgcgacgcctcgtttctcgtcgctcttcagggcgaaccggacctcattgaggaactggaggcggcaatcaaagcgcccaagtggacactctacctcggcagaaagtgctgccccccttgccgccctctgctggagcatccgggaggtgaattccccgacttgctttctgccctcgaatcggtcccctggcgtcggcggctgaaggacgatccccagccgcgacccgtcgattgcctgcttgattgggaacccaccaacgagcagcccgaggcgcccgatgatgcgctcgtctggtacgacgtgccgttgacattcgagccgccgtcgcaccaaccccgattcgtcatccgcaggcagttgcgcgtcggagcggacggcgacgtaacacttgcggtgcagccaccgcagagcgacacgccaccgcctccgcgcccaagagcggattacacgaacacagagtacaaaaaccgacgcaaggagcggctcgacgacgactatcacttgtgcgttttttgcaagtctcccgccagcaccgtgcagcacatcacgtaccgccgcgcgggcggcggcgaactccgggacgatttgcgctccctctgccgcctctgccacgacgccgtgaccatgatcgagtacgggctcggaatgggcttggaccgcatcaaccccgaagagccccgttggcgcgacaagatcatcgagaagcgggaagagattatcaggttccgctctctggagactcgccgcagacgccttgccgctgaggaggtggaatagccatgtacctctcctgcctcttgattgacgtcggcaccaaccccgaccgccccaggcccgggcggctctggctgcgaaacctccatcacgtccaccagcgcctttgcatggcgtttccatccaaagaccgaatatcccacgatccccacttcctcaagcctttcaaacccgcggactttgccaacaaccaggtccatgtaagacgtgacggcgactccggctttctcttccgcatcgacccgcaaccgggcgggcgggtcgtgatcctcgtccagtctaactctgccgtaaagcctgactggggctacgccttccacaacgcccgttttcttctgaatcctctagccgctccccctcaggtgcaggaattcgacccccgctttgagaagggtcagcggcttcgcttccgtatccgcgccaatctgagtaagaagataaaaaccagcacagagggcgttgatcttacgaggacgcgagaggggacagataagcggggccgcccgaaggcccaaggcaaacgcgtggcgctgacctgggacaaggaccagaaccgcgacgatgtgatacgaaaatggttcgccggcaagggcggccaaggtggattccaagtggaaactttccgggtcttgcagatcgggtggggcgcaggagaccgatccgacccgaggccgacgggcggccgcatgaaatttcgctcggcgttattggaggggacgcttacggttgaggacgcggacagcttcagagaaaccatcgtgggcggcgttgggcacggcaaagccttcggcttcggcctgctttccgtggcgccgctctcgctgtagcggcggtctccgaccgccggtacgtcgatcggagatcgacgctacaatcccttgtcgatcggggatccgtgcaacatttcttgagcggagatcgagccaatatgaaattcaaaccccgcttgcggcgactggactggctctatacgggcagcccaatctactatctcacgctgtgtacgcaggaccgcaaacgctcgttggcaaatcctgcgattcaccgggaattcacgagattctccgaacgggcgagcgattttcttgtttgggtcgggttcttcatgatcatgcctgatcacatccatcttttcgccggcttttgtcgtgagtccccacctttagggaaatggatcaaggcgctgcgcggggatttatccaaagtcctccgggaagatgagggcgagggcacacattgggagaaagactttttcgatcacgtcctgagatcgcaagaatcctatcgggagaaatatgaatatgtccggcagaatccggtccgggccggtttagtcaagcgcccggaagattggccgtaccagggtgagatccatcgcctggttttgtagcggcggtctccgaccgccgtaacgtcgatcggagatcgactacaaccccggtcgatcggagatcgacgctacaaccgccgtcgatcggagatcgacgctacagcacgggctggaggctctgtgagaattcaagatctccacgttctacccaagttcagtgacgggtggagttatctgtacgtcgagcattgccacgtcgatcaggaagagcgggccattgccgtccacgatcaagccgggaaggtgccggtcccctgtgccaatctggctctcctgatgttgggtccgggcgtctcgattactcacgccgccatctccgtgttggcgggccatgggtgcctggtggcttggtgcggggaggagggagtccgcttctacgccgtgggcatgggcgagacgcgcaacgcggccaacttcctgcatcaggcgaggctgtgggcggaccagggtttccatatgcaggtggtgcgccgcctctatcagttgcgattttcggagaagttcgaccctgccctgaccctccagcaaatccgcggcatggagggcgtgcgggtgcgcgatgcctacgccaaggccgcccaggaagccggcatcacgtggtcgggccgcagctataaacgcgatgagtggagcaaggcggaccctgccaaccgagccttgtccgccgctaactcctgcctatatggaatctgccatgctgccatcgtgtcagcaggtttttcgcccgcactcgggtttatccacaccggcaagatgctgtccttcgtctacgatctcgccgacctgtacaaggctgaaattaccgttccagtggcatttcgcgccgccgccgaggggacgggacagttggaacgccgggtgcgcatcacctgccgcgatcagttcgtatccacgcggcttctggagagaatcatcccggatgtccaaagggcgttgatgctggcaaaagcgacggcctgggacactaccttcgacctggatgccgccgcccccggcttcctctgggacaatctggaaggagaggtcgaaggcggccgcctgctagcccccgaaatcggtgaaacggagcccggcgatggtggtcctgattcttgagcgcgtccccccagggttgcgaggcgagctgactcgctggtttttggaacctcaggcgggagtgttcgtgggacgcgtctccgccatggtccgtgatcggctctgggaaaaagcctgcagccaggccaagggaggcgggtgcttgattatctattcaagcgacaatgaacagggctttcgagtccgaacctggggccaaacagctcgggtcatcgatgacttcgagggcctttttctcgttcgcatgccgcagaatcaataatttagtaagtgttgtccccacgcgcgtgggggtgaaccgccggggctgaaggtttcatgggctggaaagaagttgtccccacgcgcgtgggggtgaaccgatatgctgcatgtgccggggctggcgcttgatgttgtccccacgcgcgtgggggtgaaccggtatcggcgagtggcaaggcgaatccacttaggttgtccccacgcgcgtgggggtgaaccgacctccgagggcgcggggcgcgtgctggcgatgttgtccccacgcgcgtgggggtgaaccggctggggccgacgcgcgcttgtgagactgcgggttgtccccacgcgcgtgggggtgaaccgcgggagaactttgaaggcacggtcctcgatcacgttgtccccacgcgcgtgggggtgaaccggcgcaggttaaggctgaggccaaggccgatgcgttgtccccacgcgcgtgggggtgaaccgtaatggtggcttgcaccttctgctcgaccgatgttgtccccacgcgcgtgggggtgaaccgcagcgggccgtgttggaggagaaggtcgcggagttgtccccacgcgcgtgggggtgaaccgttcccagccgcaggcaggatcaccgtaccccagttgtccccacgcgcgtgggggtgaaccgcaaaacaatatcaagaccaagcacttggatgtgttgtccccacgcgcgtgggggtgaaccgcatcgggcagcacagcggccttataccccaaagttgtccccacgcgcgtgggggtgaaccggcagctcgcggcgattcgcattgccgctgaaagttgtccccacgcgcgtgggggtgaaccggggagtcgtgagtgtagttacaggcagggttcgttgtccccacgcgcgtgggggtgaaccgcttctgcatcttataaagaacgccagtttgaagttgtccccacgcgcgtgggggtgaaccggtacggttcccaggggaattatttcttggggtgttgtccccacgcgcgtgggggtgaaccgatgtagcttgatatgggtgtggtgtcgcagaagttgtccccacgcgcgtgggggtgaaccggcggcgcgcacattccaacctcgtccgtatccgttgtccccacgcgcgtgggggtg

SEQ ID NO: 1072 - DNA, 103259 bp, Artificial Sequence
  Synthetic Oligonucleotide
  misc_feature (1)..(94535): n is a, c, g, or t
nnnnnnnnnnnnnnnnnnnnnnnnnnnnnnnnnnnnnnnnnnnnnnnnnnnnnnnnnnnnnnnnnnnnnnnnnnnnnnnnnnnnnnnnnnnnnnnnnnnnnnnnnnnnnnnnnnnnnnnnnnnnnnnnnnnnnnnnnnnnnnnnnnnnnnnnnnnnnnnnnnnnnnnnnnnnnnnnnnnnnnnnnnnnnnnnnnnnnnnnnnnnnnnnnnnnnnnnnnnnnnnnnnnnnnnnnnnnnnnnnnnnnnnnnnnnnnnnnnnnnnnnnnnnnnnnnnnnnnnnnnnnnnnnnnnnnnnnnnnnnnnnnnnnnnnnnnnnnnnnnnnnnnnnnnnnnnnnnnnnnnnnnnnnnnnnnnnnnnnnnnnnnnnnnnnnnnnnnnnnnnnnnnnnnnnnnnnnnnnnnnnnnnnnnnnnnnnnnnnnnnnnnnnnnnnnnnnnnnnnnnnnnnnnnnnnnnnnnnnnnnnnnnnnnnnnnnnnnnnnnnnnnnnnnnnnnnnnnnnnnnnnnnnnnnnnnnnnnnnnnnnnnnnnnnnnnnnnnnnnnnnnnnnnnnnnnnnnnnnnnnnnnnnnnnnnnnnnnnnnnnnnnnnnnnnnnnnnnnnnnnnnnnnnnnnnnnnnnnnnnnnnnnnnnnnnnnnnnnnnnnnnnnnnnnnnnnnnnnnnnnnnnnnnnnnnnnnnnnnnnnnnnnnnnnnnnnnnnnnnnnnnnnnnnnnnnnnnnnnnnnnnnnnnnnnnnnnnnnnnnnnnnnnnnnnnnnnnnnnnnnnnnnnnnnnnnnnnnnnnnnnnnnnnnnnnnnnnnnnnnnnnnnnnnnnnnnnnnnnnnnnnnnnnnnnnnnnnnnnnnnnnnnnnnnnnnnnnnnnnnnnnnnnnnnnnnnnnnnnnnnnnnnnnnnnnnnnnnnnnnnnnnnnnnnnnnnnnnnnnnnnnnnnnnnnnnnnnnnnnnnnnnnnnnnnnnnnnnnnnnnnnnnnnnnnnnnnnnnnnnnnnnnnnnnnnnnnnnnnnnnnnnnnnnnnnnnnnnnnnnnnnnnnnnnnnnnnnnnnnnnnnnnnnnnnnnnnnnnnnnnnnnnnnnnnnnnnnnnnnnnnnnnnnnnnnnnnnnnnnnnnnnnnnnnnnnnnnnnnnnnnnnnnnnnnnnnnnnnnnnnnnnnnnnnnnnnnnnnnnnnnnnnnnnnnnnnnnnnnnnnnnnnnnnnnnnnnnnnnnnnnnnnnnnnnnnnnnnnnnnnnnnnnnnnnnnnnnnnnnnnnnnnnnnnnnnnnnnnnnnnnnnnnnnnnnnnnnnnnnnnnnnnnnnnnnnnnnnnnnnnnnnnnnnnnnnnnnnnnnnnnnnnnnnnnnnnnnnnnnnnnnnnnnnnnnnnnnnnnnnnnnnnnnnnnnnnnnnnnnnnnnnnnnnnnnnnnnnnnnnnnnnnnnnnnnnnnnnnnnnnnnnnnnnnnnnnnnnnnnnnnnnnnnnnnnnnnnnnnnnnnnnnnnnnnnnnnnnnnnnnnnnnnnnnnnnnnnnnnnnnnnnnnnnnnnnnnnnnnnnnnnnnnnnnnnnnnnnnnnnnnnnnnnnnnnnnnnnnnnnnnnnnnnnnnnnnnnnnnnnnnnnnnnnnnnnnnnnnnnnnnnnnnnnnnnnnnnnnnnnnnnnnnnnnnnnnnnnnnnnnnnnnnnnnnnnnnnnnnnnnnnnnnnnnnnnnnnnnnnnnnnnnnnnnnnnnnnnnnnnnnnnnnnnnnnnnnnnnnnnnnnnnnnnnnnnnnnnnnnnnnnnnnnnnnnnnnnnnnnnnnnnnnnnnnnnnnnnnnnnnnnnnnnnnnnnnnnnnnnnnnnnnnnnnnnnnnnnnnnnnnnnnnnnnnnnnnnnnnnnnnnnnnnnnnnnnnnnnnnnnnnnnnnnnnnnnnnnnnnnnnnnnnnnnnnnnnnnnnnnnnnnnnnnnnnnnnnnnnnnnnnnnnnnnnnnnnnnnnnnnnnnnnnnnnnnnnnnnnnnnnnnnnnnnnnnnnnnnnnnnnnnnnnnnnnnnnnnnnnnnnnnnnnnnnnnnnnnnnnnnnnnnnnnnnnnnnnnnnnnnnnnnnnnnnnnnnnnnnnnnnnnnnnnnnnnnnnnnnnnnnnnnnnnnnnnnnnnnnnnnnnnnnnnnnnnnnnnnnnnnnnnnnnnnnnnnnnnnnnnnnnnnnnnnnnnnnnnnnnnnnnnnnnnnnnnnnnnnnnnnnnnnnnnnnnnnnnnnnnnnnnnnnnnnnnnnnnnnnnnnnnnnnnnnnnnnnnnnnnnnnnnnnnnnnnnnnnnnnnnnnnnnnnnnnnnnnnnnnnnnnnnnnnnnnnnnnnnnnnnnnnnnnnnnnnnnnnnnnnnnnnnnnnnnnnnnnnnnnnnnnnnnnnnnnnnnnnnnnnnnnnnnnnnnnnnnnnnnnnnnnnnnnnnnnnnnnnnnnnnnnnnnnnnnnnnnnnnnnnnnnnnnnnnnnnnnnnnnnnnnnnnnnnnnnnnnnnnnnnnnnnnnnnnnnnnnnnnnnnnnnnnnnnnnnnnnnnnnnnnnnnnnnnnnnnnnnnnnnnnnnnnnnnnnnnnnnnnnnnnnnnnnnnnnnnnnnnnnnnnnnnnnnnnnnnnnnnnnnnnnnnnnnnnnnnnnnnnnnnnnnnnnnnnnnnnnnnnnnnnnnnnnnnnnnnnnnnnnnnnnnnnnnnnnnnnnnnnnnnnnnnnnnnnnnnnnnnnnnnnnnnnnnnnnnnnnnnnnnnnnnnnnnnnnnnnnnnnnnnnnnnnnnnnnnnnnnnnnnnnnnnnnnnnnnnnnnnnnnnnnnnnnnnnnnnnnnnnnnnnnnnnnnnnnnnnnnnnnnnnnnnnnnnnnnnnnnnnnnnnnnnnnnnnnnnnnnnnnnnnnnnnnnnnnnnnnnnnnnnnnnnnnnnnnnnnnnnnnnnnnnnnnnnnnnnnnnnnnnnnnnnnnnnnnnnnnnnnnnnnnnnnnnnnnnnnnnnnnnnnnnnnnnnnnnnnnnnnnnnnnnnnnnnnnnnnnnnnnnnnnnnnnnnnnnnnnnnnnnnnnnnnnnnnnnnnnnnnnnnnnnnnnnnnnnnnnnnnnnnnnnnnnnnnnnnnnnnnnnnnnnnnnnnnnnnnnnnnnnnnnnnnnnnnnnnnnnnnnnnnnnnnnnnnnnnnnnnnnnnnnnnnnnnnnnnnnnnnnnnnnnnnnnnnnnnnnnnnnnnnnnnnnnnnnnnnnnnnnnnnnnnnnnnnnnnnnnnnnnnnnnnnnnnnnnnnnnnnnnnnnnnnnnnnnnnnnnnnnnnnnnnnnnnnnnnnnnnnnnnnnnnnnnnnnnnnnnnnnnnnnnnnnnnnnnnnnnnnnnnnnnnnnnnnnnnnnnnnnnnnnnnnnnnnnnnnnnnnnnnnnnnnnnnnnnnnnnnnnnnnnnnnnnnnnnnnnnnnnnnnnnnnnnnnnnnnnnnnnnnnnnnnnnnnnnnnnnnnnnnnnnnnnnnnnnnnnnnnnnnnnnnnnnnnnnnnnnnnnnnnnnnnnnnnnnnnnnnnnnnnnnnnnnnnnnnnnnnnnnnnnnnnnnnnnnnnnnnnnnnnnnnnnnnnnnnnnnnnnnnnnnnnnnnnnnnnnnnnnnnnnnnnnnnnnnnnnnnnnnnnnnnnnnnnnnnnnnnnnnnnnnnnnnnnnnnnnnnnnnnnnnnnnnnnnnnnnnnnnnnnnnnnnnnnnnnnnnnnnnnnnnnnnnnnnnnnnnnnnnnnnnnnnnnnnnnnnnnnnnnnnnnnnnnnnnnnnnnnnnnnnnnnnnnnnnnnnnnnnnnnnnnnnnnnnnnnnnnnnnnnnnnnnnnnnnnnnnnnnnnnnnnnnnnnnnnnnnnnnnnnnnnnnnnnnnnnnnnnnnnnnnnnnnnnnnnnnnnnnnnnnnnnnnnnnnnnnnnnnnnnnnnnnnnnnnnnnnnnnnnnnnnnnnnnnnnnnnnnnnnnnnnnnnnnnnnnnnnnnnnnnnnnnnnnnnnnnnnnnnnnnnnnnnnnnnnnnnnnnnnnnnnnnnnnnnnnnnnnnnnnnnnnnnnnnnnnnnnnnnnnnnnnnnnnnnnnnnnnnnnnnnnnnnnnnnnnnnnnnnnnnnnnnnnnnnnnnnnnnnnnnnnnnnnnnnnnnnnnnnnnnnnnnnnnnnnnnnnnnnnnnnnnnnnnnnnnnnnnnnnnnnnnnnnnnnnnnnnnnnnnnnnnnnnnnnnnnnnnnnnnnnnnnnnnnnnnnnnnnnnnnnnnnnnnnnnnnnnnnnnnnnnnnnnnnnnnnnnnnnnnnnnnnnnnnnnnnnnnnnnnnnnnnnnnnnnnnnnnnnnnnnnnnnnnnnnnnnnnnnnnnnnnnnnnnnnnnnnnnnnnnnnnnnnnnnnnnnnnnnnnnnnnnnnnnnnnnnnnnnnnnnnnnnnnnnnnnnnnnnnnnnnnnnnnnnnnnnnnnnnnnnnnnnnnnnnnnnnnnnnnnnnnnnnnnnnnnnnnnnnnnnnnnnnnnnnnnnnnnnnnnnnnnnnnnnnnnnnnnnnnnnnnnnnnnnnnnnnnnnnnnnnnnnnnnnnnnnnnnnnnnnnnnnnnnnnnnnnnnnnnnnnnnnnnnnnnnnnnnnnnnnnnnnnnnnnnnnnnnnnnnnnnnnnnnnnnnnnnnnnnnnnnnnnnnnnnnnnnnnnnnnnnnnnnnnnnnnnnnnnnnnnnnnnnnnnnnnnnnnnnnnnnnnnnnnnnnnnnnnnnnnnnnnnnnnnnnnnnnnnnnnnnnnnnnnnnnnnnnnnnnnnnnnnnnnnnnnnnnnnnnnnnnnnnnnnnnnnnnnnnnnnnnnnnnnnnnnnnnnnnnnnnnnnnnnnnnnnnnnnnnnnnnnnnnnnnnnnnnnnnnnnnnnnnnnnnnnnnnnnnnnnnnnnnnnnnnnnnnnnnnnnnnnnnnnnnnnnnnnnnnnnnnnnnnnnnnnnnnnnnnnnnnnnnnnnnnnnnnnnnnnnnnnnnnnnnnnnnnnnnnnnnnnnnnnnnnnnnnnnnnnnnnnnnnnnnnnnnnnnnnnnnnnnnnnnnnnnnnnnnnnnnnnnnnnnnnnnnnnnnnnnnnnnnnnnnnnnnnnnnnnnnnnnnnnnnnnnnnnnnnnnnnnnnnnnnnnnnnnnnnnnnnnnnnnnnnnnnnnnnnnnnnnnnnnnnnnnnnnnnnnnnnnnnnnnnnnnnnnnnnnnnnnnnnnnnnnnnnnnnnnnnnnnnnnnnnnnnnnnnnnnnnnnnnnnnnnnnnnnnnnnnnnnnnnnnnnnnnnnnnnnnnnnnnnnnnnnnnnnnnnnnnnnnnnnnnnnnnnnnnnnnnnnnnnnnnnnnnnnnnnnnnnnnnnnnnnnnnnnnnnnnnnnnnnnnnnnnnnnnnnnnnnnnnnnnnnnnnnnnnnnnnnnnnnnnnnnnnnnnnnnnnnnnnnnnnnnnnnnnnnnnnnnnnnnnnnnnnnnnnnnnnnnnnnnnnnnnnnnnnnnnnnnnnnnnnnnnnnnnnnnnnnnnnnnnnnnnnnnnnnnnnnnnnnnnnnnnnnnnnnnnnnnnnnnnnnnnnnnnnnnnnnnnnnnnnnnnnnnnnnnnnnnnnnnnnnnnnnnnnnnnnnnnnnnnnnnnnnnnnnnnnnnnnnnnnnnnnnnnnnnnnnnnnnnnnnnnnnnnnnnnnnnnnnnnnnnnnnnnnnnnnnnnnnnnnnnnnnnnnnnnnnnnnnnnnnnnnnnnnnnnnnnnnnnnnnnnnnnnnnnnnnnnnnnnnnnnnnnnnnnnnnnnnnnnnnnnnnnnnnnnnnnnnnnnnnnnnnnnnnnnnnnnnnnnnnnnnnnnnnnnnnnnnnnnnnnnnnnnnnnnnnnnnnnnnnnnnnnnnnnnnnnnnnnnnnnnnnnnnnnnnnnnnnnnnnnnnnnnnnnnnnnnnnnnnnnnnnnnnnnnnnnnnnnnnnnnnnnnnnnnnnnnnnnnnnnnnnnnnnnnnnnnnnnnnnnnnnnnnnnnnnnnnnnnnnnnnnnnnnnnnnnnnnnnnnnnnnnnnnnnnnnnnnnnnnnnnnnnnnnnnnnnnnnnnnnnnnnnnnnnnnnnnnnnnnnnnnnnnnnnnnnnnnnnnnnnnnnnnnnnnnnnnnnnnnnnnnnnnnnnnnnnnnnnnnnnnnnnnnnnnnnnnnnnnnnnnnnnnnnnnnnnnnnnnnnnnnnnnnnnnnnnnnnnnnnnnnnnnnnnnnnnnnnnnnnnnnnnnnnnnnnnnnnnnnnnnnnnnnnnnnnnnnnnnnnnnnnnnnnnnnnnnnnnnnnnnnnnnnnnnnnnnnnnnnnnnnnnnnnnnnnnnnnnnnnnnnnnnnnnnnnnnnnnnnnnnnnnnnnnnnnnnnnnnnnnnnnnnnnnnnnnnnnnnnnnnnnnnnnnnnnnnnnnnnnnnnnnnnnnnnnnnnnnnnnnnnnnnnnnnnnnnnnnnnnnnnnnnnnnnnnnnnnnnnnnnnnnnnnnnnnnnnnnnnnnnnnnnnnnnnnnnnnnnnnnnnnnnnnnnnnnnnnnnnnnnnnnnnnnnnnnnnnnnnnnnnnnnnnnnnnnnnnnnnnnnnnnnnnnnnnnnnnnnnnnnnnnnnnnnnnnnnnnnnnnnnnnnnnnnnnnnnnnnnnnnnnnnnnnnnnnnnnnnnnnnnnnnnnnnnnnnnnnnnnnnnnnnnnnnnnnnnnnnnnnnnnnnnnnnnnnnnnnnnnnnnnnnnnnnnnnnnnnnnnnnnnnnnnnnnnnnnnnnnnnnnnnnnnnnnnnnnnnnnnnnnnnnnnnnnnnnnnnnnnnnnnnnnnnnnnnnnnnnnnnnnnnnnnnnnnnnnnnnnnnnnnnnnnnnnnnnnnnnnnnnnnnnnnnnnnnnnnnnnnnnnnnnnnnnnnnnnnnnnnnnnnnnnnnnnnnnnnnnnnnnnnnnnnnnnnnnnnnnnnnnnnnnnnnnnnnnnnnnnnnnnnnnnnnnnnnnnnnnnnnnnnnnnnnnnnnnnnnnnnnnnnnnnnnnnnnnnnnnnnnnnnnnnnnnnnnnnnnnnnnnnnnnnnnnnnnnnnnnnnnnnnnnnnnnnnnnnnnnnnnnnnnnnnnnnnnnnnnnnnnnnnnnnnnnnnnnnnnnnnnnnnnnnnnnnnnnnnnnnnnnnnnnnnnnnnnnnnnnnnnnnnnnnnnnnnnnnnnnnnnnnnnnnnnnnnnnnnnnnnnnnnnnnnnnnnnnnnnnnnnnnnnnnnnnnnnnnnnnnnnnnnnnnnnnnnnnnnnnnnnnnnnnnnnnnnnnnnnnnnnnnnnnnnnnnnnnnnnnnnnnnnnnnnnnnnnnnnnnnnnnnnnnnnnnnnnnnnnnnnnnnnnnnnnnnnnnnnnnnnnnnnnnnnnnnnnnnnnnnnnnnnnnnnnnnnnnnnnnnnnnnnnnnnnnnnnnnnnnnnnnnnnnnnnnnnnnnnnnnnnnnnnnnnnnnnnnnnnnnnnnnnnnnnnnnnnnnnnnnnnnnnnnnnnnnnnnnnnnnnnnnnnnnnnnnnnnnnnnnnnnnnnnnnnnnnnnnnnnnnnnnnnnnnnnnnnnnnnnnnnnnnnnnnnnnnnnnnnnnnnnnnnnnnnnnnnnnnnnnnnnnnnnnnnnnnnnnnnnnnnnnnnnnnnnnnnnnnnnnnnnnnnnnnnnnnnnnnnnnnnnnnnnnnnnnnnnnnnnnnnnnnnnnnnnnnnnnnnnnnnnnnnnnnnnnnnnnnnnnnnnnnnnnnnnnnnnnnnnnnnnnnnnnnnnnnnnnnnnnnnnnnnnnnnnnnnnnnnnnnnnnnnnnnnnnnnnnnnnnnnnnnnnnnnnnnnnnnnnnnnnnnnnnnnnnnnnnnnnnnnnnnnnnnnnnnnnnnnnnnnnnnnnnnnnnnnnnnnnnnnnnnnnnnnnnnnnnnnnnnnnnnnnnnnnnnnnnnnnnnnnnnnnnnnnnnnnnnnnnnnnnnnnnnnnnnnnnnnnnnnnnnnnnnnnnnnnnnnnnnnnnnnnnnnnnnnnnnnnnnnnnnnnnnnnnnnnnnnnnnnnnnnnnnnnnnnnnnnnnnnnnnnnnnnnnnnnnnnnnnnnnnnnnnnnnnnnnnnnnnnnnnnnnnnnnnnnnnnnnnnnnnnnnnnnnnnnnnnnnnnnnnnnnnnnnnnnnnnnnnnnnnnnnnnnnnnnnnnnnnnnnnnnnnnnnnnnnnnnnnnnnnnnnnnnnnnnnnnnnnnnnnnnnnnnnnnnnnnnnnnnnnnnnnnnnnnnnnnnnnnnnnnnnnnnnnnnnnnnnnnnnnnnnnnnnnnnnnnnnnnnnnnnnnnnnnnnnnnnnnnnnnnnnnnnnnnnnnnnnnnnnnnnnnnnnnnnnnnnnnnnnnnnnnnnnnnnnnnnnnnnnnnnnnnnnnnnnnnnnnnnnnnnnnnnnnnnnnnnnnnnnnnnnnnnnnnnnnnnnnnnnnnnnnnnnnnnnnnnnnnnnnnnnnnnnnnnnnnnnnnnnnnnnnnnnnnnnnnnnnnnnnnnnnnnnnnnnnnnnnnnnnnnnnnnnnnnnnnnnnnnnnnnnnnnnnnnnnnnnnnnnnnnnnnnnnnnnnnnnnnnnnnnnnnnnnnnnnnnnnnnnnnnnnnnnnnnnnnnnnnnnnnnnnnnnnnnnnnnnnnnnnnnnnnnnnnnnnnnnnnnnnnnnnnnnnnnnnnnnnnnnnnnnnnnnnnnnnnnnnnnnnnnnnnnnnnnnnnnnnnnnnnnnnnnnnnnnnnnnnnnnnnnnnnnnnnnnnnnnnnnnnnnnnnnnnnnnnnnnnnnnnnnnnnnnnnnnnnnnnnnnnnnnnnnnnnnnnnnnnnnnnnnnnnnnnnnnnnnnnnnnnnnnnnnnnnnnnnnnnnnnnnnnnnnnnnnnnnnnnnnnnnnnnnnnnnnnnnnnnnnnnnnnnnnnnnnnnnnnnnnnnnnnnnnnnnnnnnnnnnnnnnnnnnnnnnnnnnnnnnnnnnnnnnnnnnnnnnnnnnnnnnnnnnnnnnnnnnnnnnnnnnnnnnnnnnnnnnnnnnnnnnnnnnnnnnnnnnnnnnnnnnnnnnnnnnnnnnnnnnnnnnnnnnnnnnnnnnnnnnnnnnnnnnnnnnnnnnnnnnnnnnnnnnnnnnnnnnnnnnnnnnnnnnnnnnnnnnnnnnnnnnnnnnnnnnnnnnnnnnnnnnnnnnnnnnnnnnnnnnnnnnnnnnnnnnnnnnnnnnnnnnnnnnnnnnnnnnnnnnnnnnnnnnnnnnnnnnnnnnnnnnnnnnnnnnnnnnnnnnnnnnnnnnnnnnnnnnnnnnnnnnnnnnnnnnnnnnnnnnnnnnnnnnnnnnnnnnnnnnnnnnnnnnnnnnnnnnnnnnnnnnnnnnnnnnnnnnnnnnnnnnnnnnnnnnnnnnnnnnnnnnnnnnnnnnnnnnnnnnnnnnnnnnnnnnnnnnnnnnnnnnnnnnnnnnnnnnnnnnnnnnnnnnnnnnnnnnnnnnnnnnnnnnnnnnnnnnnnnnnnnnnnnnnnnnnnnnnnnnnnnnnnnnnnnnnnnnnnnnnnnnnnnnnnnnnnnnnnnnnnnnnnnnnnnnnnnnnnnnnnnnnnnnnnnnnnnnnnnnnnnnnnnnnnnnnnnnnnnnnnnnnnnnnnnnnnnnnnnnnnnnnnnnnnnnnnnnnnnnnnnnnnnnnnnnnnnnnnnnnnnnnnnnnnnnnnnnnnnnnnnnnnnnnnnnnnnnnnnnnnnnnnnnnnnnnnnnnnnnnnnnnnnnnnnnnnnnnnnnnnnnnnnnnnnnnnnnnnnnnnnnnnnnnnnnnnnnnnnnnnnnnnnnnnnnnnnnnnnnnnnnnnnnnnnnnnnnnnnnnnnnnnnnnnnnnnnnnnnnnnnnnnnnnnnnnnnnnnnnnnnnnnnnnnnnnnnnnnnnnnnnnnnnnnnnnnnnnnnnnnnnnnnnnnnnnnnnnnnnnnnnnnnnnnnnnnnnnnnnnnnnnnnnnnnnnnnnnnnnnnnnnnnnnnnnnnnnnnnnnnnnnnnnnnnnnnnnnnnnnnnnnnnnnnnnnnnnnnnnnnnnnnnnnnnnnnnnnnnnnnnnnnnnnnnnnnnnnnnnnnnnnnnnnnnnnnnnnnnnnnnnnnnnnnnnnnnnnnnnnnnnnnnnnnnnnnnnnnnnnnnnnnnnnnnnnnnnnnnnnnnnnnnnnnnnnnnnnnnnnnnnnnnnnnnnnnnnnnnnnnnnnnnnnnnnnnnnnnnnnnnnnnnnnnnnnnnnnnnnnnnnnnnnnnnnnnnnnnnnnnnnnnnnnnnnnnnnnnnnnnnnnnnnnnnnnnnnnnnnnnnnnnnnnnnnnnnnnnnnnnnnnnnnnnnnnnnnnnnnnnnnnnnnnnnnnnnnnnnnnnnnnnnnnnnnnnnnnnnnnnnnnnnnnnnnnnnnnnnnnnnnnnnnnnnnnnnnnnnnnnnnnnnnnnnnnnnnnnnnnnnnnnnnnnnnnnnnnnnnnnnnnnnnnnnnnnnnnnnnnnnnnnnnnnnnnnnnnnnnnnnnnnnnnnnnnnnnnnnnnnnnnnnnnnnnnnnnnnnnnnnnnnnnnnnnnnnnnnnnnnnnnnnnnnnnnnnnnnnnnnnnnnnnnnnnnnnnnnnnnnnnnnnnnnnnnnnnnnnnnnnnnnnnnnnnnnnnnnnnnnnnnnnnnnnnnnnnnnnnnnnnnnnnnnnnnnnnnnnnnnnnnnnnnnnnnnnnnnnnnnnnnnnnnnnnnnnnnnnnnnnnnnnnnnnnnnnnnnnnnnnnnnnnnnnnnnnnnnnnnnnnnnnnnnnnnnnnnnnnnnnnnnnnnnnnnnnnnnnnnnnnnnnnnnnnnnnnnnnnnnnnnnnnnnnnnnnnnnnnnnnnnnnnnnnnnnnnnnnnnnnnnnnnnnnnnnnnnnnnnnnnnnnnnnnnnnnnnnnnnnnnnnnnnnnnnnnnnnnnnnnnnnnnnnnnnnnnnnnnnnnnnnnnnnnnnnnnnnnnnnnnnnnnnnnnnnnnnnnnnnnnnnnnnnnnnnnnnnnnnnnnnnnnnnnnnnnnnnnnnnnnnnnnnnnnnnnnnnnnnnnnnnnnnnnnnnnnnnnnnnnnnnnnnnnnnnnnnnnnnnnnnnnnnnnnnnnnnnnnnnnnnnnnnnnnnnnnnnnnnnnnnnnnnnnnnnnnnnnnnnnnnnnnnnnnnnnnnnnnnnnnnnnnnnnnnnnnnnnnnnnnnnnnnnnnnnnnnnnnnnnnnnnnnnnnnnnnnnnnnnnnnnnnnnnnnnnnnnnnnnnnnnnnnnnnnnnnnnnnnnnnnnnnnnnnnnnnnnnnnnnnnnnnnnnnnnnnnnnnnnnnnnnnnnnnnnnnnnnnnnnnnnnnnnnnnnnnnnnnnnnnnnnnnnnnnnnnnnnnnnnnnnnnnnnnnnnnnnnnnnnnnnnnnnnnnnnnnnnnnnnnnnnnnnnnnnnnnnnnnnnnnnnnnnnnnnnnnnnnnnnnnnnnnnnnnnnnnnnnnnnnnnnnnnnnnnnnnnnnnnnnnnnnnnnnnnnnnnnnnnnnnnnnnnnnnnnnnnnnnnnnnnnnnnnnnnnnnnnnnnnnnnnnnnnnnnnnnnnnnnnnnnnnnnnnnnnnnnnnnnnnnnnnnnnnnnnnnnnnnnnnnnnnnnnnnnnnnnnnnnnnnnnnnnnnnnnnnnnnnnnnnnnnnnnnnnnnnnnnnnnnnnnnnnnnnnnnnnnnnnnnnnnnnnnnnnnnnnnnnnnnnnnnnnnnnnnnnnnnnnnnnnnnnnnnnnnnnnnnnnnnnnnnnnnnnnnnnnnnnnnnnnnnnnnnnnnnnnnnnnnnnnnnnnnnnnnnnnnnnnnnnnnnnnnnnnnnnnnnnnnnnnnnnnnnnnnnnnnnnnnnnnnnnnnnnnnnnnnnnnnnnnnnnnnnnnnnnnnnnnnnnnnnnnnnnnnnnnnnnnnnnnnnnnnnnnnnnnnnnnnnnnnnnnnnnnnnnnnnnnnnnnnnnnnnnnnnnnnnnnnnnnnnnnnnnnnnnnnnnnnnnnnnnnnnnnnnnnnnnnnnnnnnnnnnnnnnnnnnnnnnnnnnnnnnnnnnnnnnnnnnnnnnnnnnnnnnnnnnnnnnnnnnnnnnnnnnnnnnnnnnnnnnnnnnnnnnnnnnnnnnnnnnnnnnnnnnnnnnnnnnnnnnnnnnnnnnnnnnnnnnnnnnnnnnnnnnnnnnnnnnnnnnnnnnnnnnnnnnnnnnnnnnnnnnnnnnnnnnnnnnnnnnnnnnnnnnnnnnnnnnnnnnnnnnnnnnnnnnnnnnnnnnnnnnnnnnnnnnnnnnnnnnnnnnnnnnnnnnnnnnnnnnnnnnnnnnnnnnnnnnnnnnnnnnnnnnnnnnnnnnnnnnnnnnnnnnnnnnnnnnnnnnnnnnnnnnnnnnnnnnnnnnnnnnnnnnnnnnnnnnnnnnnnnnnnnnnnnnnnnnnnnnnnnnnnnnnnnnnnnnnnnnnnnnnnnnnnnnnnnnnnnnnnnnnnnnnnnnnnnnnnnnnnnnnnnnnnnnnnnnnnnnnnnnnnnnnnnnnnnnnnnnnnnnnnnnnnnnnnnnnnnnnnnnnnnnnnnnnnnnnnnnnnnnnnnnnnnnnnnnnnnnnnnnnnnnnnnnnnnnnnnnnnnnnnnnnnnnnnnnnnnnnnnnnnnnnnnnnnnnnnnnnnnnnnnnnnnnnnnnnnnnnnnnnnnnnnnnnnnnnnnnnnnnnnnnnnnnnnnnnnnnnnnnnnnnnnnnnnnnnnnnnnnnnnnnnnnnnnnnnnnnnnnnnnnnnnnnnnnnnnnnnnnnnnnnnnnnnnnnnnnnnnnnnnnnnnnnnnnnnnnnnnnnnnnnnnnnnnnnnnnnnnnnnnnnnnnnnnnnnnnnnnnnnnnnnnnnnnnnnnnnnnnnnnnnnnnnnnnnnnnnnnnnnnnnnnnnnnnnnnnnnnnnnnnnnnnnnnnnnnnnnnnnnnnnnnnnnnnnnnnnnnnnnnnnnnnnnnnnnnnnnnnnnnnnnnnnnnnnnnnnnnnnnnnnnnnnnnnnnnnnnnnnnnnnnnnnnnnnnnnnnnnnnnnnnnnnnnnnnnnnnnnnnnnnnnnnnnnnnnnnnnnnnnnnnnnnnnnnnnnnnnnnnnnnnnnnnnnnnnnnnnnnnnnnnnnnnnnnnnnnnnnnnnnnnnnnnnnnnnnnnnnnnnnnnnnnnnnnnnnnnnnnnnnnnnnnnnnnnnnnnnnnnnnnnnnnnnnnnnnnnnnnnnnnnnnnnnnnnnnnnnnnnnnnnnnnnnnnnnnnnnnnnnnnnnnnnnnnnnnnnnnnnnnnnnnnnnnnnnnnnnnnnnnnnnnnnnnnnnnnnnnnnnnnnnnnnnnnnnnnnnnnnnnnnnnnnnnnnnnnnnnnnnnnnnnnnnnnnnnnnnnnnnnnnnnnnnnnnnnnnnnnnnnnnnnnnnnnnnnnnnnnnnnnnnnnnnnnnnnnnnnnnnnnnnnnnnnnnnnnnnnnnnnnnnnnnnnnnnnnnnnnnnnnnnnnnnnnnnnnnnnnnnnnnnnnnnnnnnnnnnnnnnnnnnnnnnnnnnnnnnnnnnnnnnnnnnnnnnnnnnnnnnnnnnnnnnnnnnnnnnnnnnnnnnnnnnnnnnnnnnnnnnnnnnnnnnnnnnnnnnnnnnnnnnnnnnnnnnnnnnnnnnnnnnnnnnnnnnnnnnnnnnnnnnnnnnnnnnnnnnnnnnnnnnnnnnnnnnnnnnnnnnnnnnnnnnnnnnnnnnnnnnnnnnnnnnnnnnnnnnnnnnnnnnnnnnnnnnnnnnnnnnnnnnnnnnnnnnnnnnnnnnnnnnnnnnnnnnnnnnnnnnnnnnnnnnnnnnnnnnnnnnnnnnnnnnnnnnnnnnnnnnnnnnnnnnnnnnnnnnnnnnnnnnnnnnnnnnnnnnnnnnnnnnnnnnnnnnnnnnnnnnnnnnnnnnnnnnnnnnnnnnnnnnnnnnnnnnnnnnnnnnnnnnnnnnnnnnnnnnnnnnnnnnnnnnnnnnnnnnnnnnnnnnnnnnnnnnnnnnnnnnnnnnnnnnnnnnnnnnnnnnnnnnnnnnnnnnnnnnnnnnnnnnnnnnnnnnnnnnnnnnnnnnnnnnnnnnnnnnnnnnnnnnnnnnnnnnnnnnnnnnnnnnnnnnnnnnnnnnnnnnnnnnnnnnnnnnnnnnnnnnnnnnnnnnnnnnnnnnnnnnnnnnnnnnnnnnnnnnnnnnnnnnnnnnnnnnnnnnnnnnnnnnnnnnnnnnnnnnnnnnnnnnnnnnnnnnnnnnnnnnnnnnnnnnnnnnnnnnnnnnnnnnnnnnnnnnnnnnnnnnnnnnnnnnnnnnnnnnnnnnnnnnnnnnnnnnnnnnnnnnnnnnnnnnnnnnnnnnnnnnnnnnnnnnnnnnnnnnnnnnnnnnnnnnnnnnnnnnnnnnnnnnnnnnnnnnnnnnnnnnnnnnnnnnnnnnnnnnnnnnnnnnnnnnnnnnnnnnnnnnnnnnnnnnnnnnnnnnnnnnnnnnnnnnnnnnnnnnnnnnnnnnnnnnnnnnnnnnnnnnnnnnnnnnnnnnnnnnnnnnnnnnnnnnnnnnnnnnnnnnnnnnnnnnnnnnnnnnnnnnnnnnnnnnnnnnnnnnnnnnnnnnnnnnnnnnnnnnnnnnnnnnnnnnnnnnnnnnnnnnnnnnnnnnnnnnnnnnnnnnnnnnnnnnnnnnnnnnnnnnnnnnnnnnnnnnnnnnnnnnnnnnnnnnnnnnnnnnnnnnnnnnnnnnnnnnnnnnnnnnnnnnnnnnnnnnnnnnnnnnnnnnnnnnnnnnnnnnnnnnnnnnnnnnnnnnnnnnnnnnnnnnnnnnnnnnnnnnnnnnnnnnnnnnnnnnnnnnnnnnnnnnnnnnnnnnnnnnnnnnnnnnnnnnnnnnnnnnnnnnnnnnnnnnnnnnnnnnnnnnnnnnnnnnnnnnnnnnnnnnnnnnnnnnnnnnnnnnnnnnnnnnnnnnnnnnnnnnnnnnnnnnnnnnnnnnnnnnnnnnnnnnnnnnnnnnnnnnnnnnnnnnnnnnnnnnnnnnnnnnnnnnnnnnnnnnnnnnnnnnnnnnnnnnnnnnnnnnnnnnnnnnnnnnnnnnnnnnnnnnnnnnnnnnnnnnnnnnnnnnnnnnnnnnnnnnnnnnnnnnnnnnnnnnnnnnnnnnnnnnnnnnnnnnnnnnnnnnnnnnnnnnnnnnnnnnnnnnnnnnnnnnnnnnnnnnnnnnnnnnnnnnnnnnnnnnnnnnnnnnnnnnnnnnnnnnnnnnnnnnnnnnnnnnnnnnnnnnnnnnnnnnnnnnnnnnnnnnnnnnnnnnnnnnnnnnnnnnnnnnnnnnnnnnnnnnnnnnnnnnnnnnnnnnnnnnnnnnnnnnnnnnnnnnnnnnnnnnnnnnnnnnnnnnnnnnnnnnnnnnnnnnnnnnnnnnnnnnnnnnnnnnnnnnnnnnnnnnnnnnnnnnnnnnnnnnnnnnnnnnnnnnnnnnnnnnnnnnnnnnnnnnnnnnnnnnnnnnnnnnnnnnnnnnnnnnnnnnnnnnnnnnnnnnnnnnnnnnnnnnnnnnnnnnnnnnnnnnnnnnnnnnnnnnnnnnnnnnnnnnnnnnnnnnnnnnnnnnnnnnnnnnnnnnnnnnnnnnnnnnnnnnnnnnnnnnnnnnnnnnnnnnnnnnnnnnnnnnnnnnnnnnnnnnnnnnnnnnnnnnnnnnnnnnnnnnnnnnnnnnnnnnnnnnnnnnnnnnnnnnnnnnnnnnnnnnnnnnnnnnnnnnnnnnnnnnnnnnnnnnnnnnnnnnnnnnnnnnnnnnnnnnnnnnnnnnnnnnnnnnnnnnnnnnnnnnnnnnnnnnnnnnnnnnnnnnnnnnnnnnnnnnnnnnnnnnnnnnnnnnnnnnnnnnnnnnnnnnnnnnnnnnnnnnnnnnnnnnnnnnnnnnnnnnnnnnnnnnnnnnnnnnnnnnnnnnnnnnnnnnnnnnnnnnnnnnnnnnnnnnnnnnnnnnnnnnnnnnnnnnnnnnnnnnnnnnnnnnnnnnnnnnnnnnnnnnnnnnnnnnnnnnnnnnnnnnnnnnnnnnnnnnnnnnnnnnnnnnnnnnnnnnnnnnnnnnnnnnnnnnnnnnnnnnnnnnnnnnnnnnnnnnnnnnnnnnnnnnnnnnnnnnnnnnnnnnnnnnnnnnnnnnnnnnnnnnnnnnnnnnnnnnnnnnnnnnnnnnnnnnnnnnnnnnnnnnnnnnnnnnnnnnnnnnnnnnnnnnnnnnnnnnnnnnnnnnnnnnnnnnnnnnnnnnnnnnnnnnnnnnnnnnnnnnnnnnnnnnnnnnnnnnnnnnnnnnnnnnnnnnnnnnnnnnnnnnnnnnnnnnnnnnnnnnnnnnnnnnnnnnnnnnnnnnnnnnnnnnnnnnnnnnnnnnnnnnnnnnnnnnnnnnnnnnnnnnnnnnnnnnnnnnnnnnnnnnnnnnnnnnnnnnnnnnnnnnnnnnnnnnnnnnnnnnnnnnnnnnnnnnnnnnnnnnnnnnnnnnnnnnnnnnnnnnnnnnnnnnnnnnnnnnnnnnnnnnnnnnnnnnnnnnnnnnnnnnnnnnnnnnnnnnnnnnnnnnnnnnnnnnnnnnnnnnnnnnnnnnnnnnnnnnnnnnnnnnnnnnnnnnnnnnnnnnnnnnnnnnnnnnnnnnnnnnnnnnnnnnnnnnnnnnnnnnnnnnnnnnnnnnnnnnnnnnnnnnnnnnnnnnnnnnnnnnnnnnnnnnnnnnnnnnnnnnnnnnnnnnnnnnnnnnnnnnnnnnnnnnnnnnnnnnnnnnnnnnnnnnnnnnnnnnnnnnnnnnnnnnnnnnnnnnnnnnnnnnnnnnnnnnnnnnnnnnnnnnnnnnnnnnnnnnnnnnnnnnnnnnnnnnnnnnnnnnnnnnnnnnnnnnnnnnnnnnnnnnnnnnnnnnnnnnnnnnnnnnnnnnnnnnnnnnnnnnnnnnnnnnnnnnnnnnnnnnnnnnnnnnnnnnnnnnnnnnnnnnnnnnnnnnnnnnnnnnnnnnnnnnnnnnnnnnnnnnnnnnnnnnnnnnnnnnnnnnnnnnnnnnnnnnnnnnnnnnnnnnnnnnnnnnnnnnnnnnnnnnnnnnnnnnnnnnnnnnnnnnnnnnnnnnnnnnnnnnnnnnnnnnnnnnnnnnnnnnnnnnnnnnnnnnnnnnnnnnnnnnnnnnnnnnnnnnnnnnnnnnnnnnnnnnnnnnnnnnnnnnnnnnnnnnnnnnnnnnnnnnnnnnnnnnnnnnnnnnnnnnnnnnnnnnnnnnnnnnnnnnnnnnnnnnnnnnnnnnnnnnnnnnnnnnnnnnnnnnnnnnnnnnnnnnnnnnnnnnnnnnnnnnnnnnnnnnnnnnnnnnnnnnnnnnnnnnnnnnnnnnnnnnnnnnnnnnnnnnnnnnnnnnnnnnnnnnnnnnnnnnnnnnnnnnnnnnnnnnnnnnnnnnnnnnnnnnnnnnnnnnnnnnnnnnnnnnnnnnnnnnnnnnnnnnnnnnnnnnnnnnnnnnnnnnnnnnnnnnnnnnnnnnnnnnnnnnnnnnnnnnnnnnnnnnnnnnnnnnnnnnnnnnnnnnnnnnnnnnnnnnnnnnnnnnnnnnnnnnnnnnnnnnnnnnnnnnnnnnnnnnnnnnnnnnnnnnnnnnnnnnnnnnnnnnnnnnnnnnnnnnnnnnnnnnnnnnnnnnnnnnnnnnnnnnnnnnnnnnnnnnnnnnnnnnnnnnnnnnnnnnnnnnnnnnnnnnnnnnnnnnnnnnnnnnnnnnnnnnnnnnnnnnnnnnnnnnnnnnnnnnnnnnnnnnnnnnnnnnnnnnnnnnnnnnnnnnnnnnnnnnnnnnnnnnnnnnnnnnnnnnnnnnnnnnnnnnnnnnnnnnnnnnnnnnnnnnnnnnnnnnnnnnnnnnnnnnnnnnnnnnnnnnnnnnnnnnnnnnnnnnnnnnnnnnnnnnnnnnnnnnnnnnnnnnnnnnnnnnnnnnnnnnnnnnnnnnnnnnnnnnnnnnnnnnnnnnnnnnnnnnnnnnnnnnnnnnnnnnnnnnnnnnnnnnnnnnnnnnnnnnnnnnnnnnnnnnnnnnnnnnnnnnnnnnnnnnnnnnnnnnnnnnnnnnnnnnnnnnnnnnnnnnnnnnnnnnnnnnnnnnnnnnnnnnnnnnnnnnnnnnnnnnnnnnnnnnnnnnnnnnnnnnnnnnnnnnnnnnnnnnnnnnnnnnnnnnnnnnnnnnnnnnnnnnnnnnnnnnnnnnnnnnnnnnnnnnnnnnnnnnnnnnnnnnnnnnnnnnnnnnnnnnnnnnnnnnnnnnnnnnnnnnnnnnnnnnnnnnnnnnnnnnnnnnnnnnnnnnnnnnnnnnnnnnnnnnnnnnnnnnnnnnnnnnnnnnnnnnnnnnnnnnnnnnnnnnnnnnnnnnnnnnnnnnnnnnnnnnnnnnnnnnnnnnnnnnnnnnnnnnnnnnnnnnnnnnnnnnnnnnnnnnnnnnnnnnnnnnnnnnnnnnnnnnnnnnnnnnnnnnnnnnnnnnnnnnnnnnnnnnnnnnnnnnnnnnnnnnnnnnnnnnnnnnnnnnnnnnnnnnnnnnnnnnnnnnnnnnnnnnnnnnnnnnnnnnnnnnnnnnnnnnnnnnnnnnnnnnnnnnnnnnnnnnnnnnnnnnnnnnnnnnnnnnnnnnnnnnnnnnnnnnnnnnnnnnnnnnnnnnnnnnnnnnnnnnnnnnnnnnnnnnnnnnnnnnnnnnnnnnnnnnnnnnnnnnnnnnnnnnnnnnnnnnnnnnnnnnnnnnnnnnnnnnnnnnnnnnnnnnnnnnnnnnnnnnnnnnnnnnnnnnnnnnnnnnnnnnnnnnnnnnnnnnnnnnnnnnnnnnnnnnnnnnnnnnnnnnnnnnnnnnnnnnnnnnnnnnnnnnnnnnnnnnnnnnnnnnnnnnnnnnnnnnnnnnnnnnnnnnnnnnnnnnnnnnnnnnnnnnnnnnnnnnnnnnnnnnnnnnnnnnnnnnnnnnnnnnnnnnnnnnnnnnnnnnnnnnnnnnnnnnnnnnnnnnnnnnnnnnnnnnnnnnnnnnnnnnnnnnnnnnnnnnnnnnnnnnnnnnnnnnnnnnnnnnnnnnnnnnnnnnnnnnnnnnnnnnnnnnnnnnnnnnnnnnnnnnnnnnnnnnnnnnnnnnnnnnnnnnnnnnnnnnnnnnnnnnnnnnnnnnnnnnnnnnnnnnnnnnnnnnnnnnnnnnnnnnnnnnnnnnnnnnnnnnnnnnnnnnnnnnnnnnnnnnnnnnnnnnnnnnnnnnnnnnnnnnnnnnnnnnnnnnnnnnnnnnnnnnnnnnnnnnnnnnnnnnnnnnnnnnnnnnnnnnnnnnnnnnnnnnnnnnnnnnnnnnnnnnnnnnnnnnnnnnnnnnnnnnnnnnnnnnnnnnnnnnnnnnnnnnnnnnnnnnnnnnnnnnnnnnnnnnnnnnnnnnnnnnnnnnnnnnnnnnnnnnnnnnnnnnnnnnnnnnnnnnnnnnnnnnnnnnnnnnnnnnnnnnnnnnnnnnnnnnnnnnnnnnnnnnnnnnnnnnnnnnnnnnnnnnnnnnnnnnnnnnnnnnnnnnnnnnnnnnnnnnnnnnnnnnnnnnnnnnnnnnnnnnnnnnnnnnnnnnnnnnnnnnnnnnnnnnnnnnnnnnnnnnnnnnnnnnnnnnnnnnnnnnnnnnnnnnnnnnnnnnnnnnnnnnnnnnnnnnnnnnnnnnnnnnnnnnnnnnnnnnnnnnnnnnnnnnnnnnnnnnnnnnnnnnnnnnnnnnnnnnnnnnnnnnnnnnnnnnnnnnnnnnnnnnnnnnnnnnnnnnnnnnnnnnnnnnnnnnnnnnnnnnnnnnnnnnnnnnnnnnnnnnnnnnnnnnnnnnnnnnnnnnnnnnnnnnnnnnnnnnnnnnnnnnnnnnnnnnnnnnnnnnnnnnnnnnnnnnnnnnnnnnnnnnnnnnnnnnnnnnnnnnnnnnnnnnnnnnnnnnnnnnnnnnnnnnnnnnnnnnnnnnnnnnnnnnnnnnnnnnnnnnnnnnnnnnnnnnnnnnnnnnnnnnnnnnnnnnnnnnnnnnnnnnnnnnnnnnnnnnnnnnnnnnnnnnnnnnnnnnnnnnnnnnnnnnnnnnnnnnnnnnnnnnnnnnnnnnnnnnnnnnnnnnnnnnnnnnnnnnnnnnnnnnnnnnnnnnnnnnnnnnnnnnnnnnnnnnnnnnnnnnnnnnnnnnnnnnnnnnnnnnnnnnnnnnnnnnnnnnnnnnnnnnnnnnnnnnnnnnnnnnnnnnnnnnnnnnnnnnnnnnnnnnnnnnnnnnnnnnnnnnnnnnnnnnnnnnnnnnnnnnnnnnnnnnnnnnnnnnnnnnnnnnnnnnnnnnnnnnnnnnnnnnnnnnnnnnnnnnnnnnnnnnnnnnnnnnnnnnnnnnnnnnnnnnnnnnnnnnnnnnnnnnnnnnnnnnnnnnnnnnnnnnnnnnnnnnnnnnnnnnnnnnnnnnnnnnnnnnnnnnnnnnnnnnnnnnnnnnnnnnnnnnnnnnnnnnnnnnnnnnnnnnnnnnnnnnnnnnnnnnnnnnnnnnnnnnnnnnnnnnnnnnnnnnnnnnnnnnnnnnnnnnnnnnnnnnnnnnnnnnnnnnnnnnnnnnnnnnnnnnnnnnnnnnnnnnnnnnnnnnnnnnnnnnnnnnnnnnnnnnnnnnnnnnnnnnnnnnnnnnnnnnnnnnnnnnnnnnnnnnnnnnnnnnnnnnnnnnnnnnnnnnnnnnnnnnnnnnnnnnnnnnnnnnnnnnnnnnnnnnnnnnnnnnnnnnnnnnnnnnnnnnnnnnnnnnnnnnnnnnnnnnnnnnnnnnnnnnnnnnnnnnnnnnnnnnnnnnnnnnnnnnnnnnnnnnnnnnnnnnnnnnnnnnnnnnnnnnnnnnnnnnnnnnnnnnnnnnnnnnnnnnnnnnnnnnnnnnnnnnnnnnnnnnnnnnnnnnnnnnnnnnnnnnnnnnnnnnnnnnnnnnnnnnnnnnnnnnnnnnnnnnnnnnnnnnnnnnnnnnnnnnnnnnnnnnnnnnnnnnnnnnnnnnnnnnnnnnnnnnnnnnnnnnnnnnnnnnnnnnnnnnnnnnnnnnnnnnnnnnnnnnnnnnnnnnnnnnnnnnnnnnnnnnnnnnnnnnnnnnnnnnnnnnnnnnnnnnnnnnnnnnnnnnnnnnnnnnnnnnnnnnnnnnnnnnnnnnnnnnnnnnnnnnnnnnnnnnnnnnnnnnnnnnnnnnnnnnnnnnnnnnnnnnnnnnnnnnnnnnnnnnnnnnnnnnnnnnnnnnnnnnnnnnnnnnnnnnnnnnnnnnnnnnnnnnnnnnnnnnnnnnnnnnnnnnnnnnnnnnnnnnnnnnnnnnnnnnnnnnnnnnnnnnnnnnnnnnnnnnnnnnnnnnnnnnnnnnnnnnnnnnnnnnnnnnnnnnnnnnnnnnnnnnnnnnnnnnnnnnnnnnnnnnnnnnnnnnnnnnnnnnnnnnnnnnnnnnnnnnnnnnnnnnnnnnnnnnnnnnnnnnnnnnnnnnnnnnnnnnnnnnnnnnnnnnnnnnnnnnnnnnnnnnnnnnnnnnnnnnnnnnnnnnnnnnnnnnnnnnnnnnnnnnnnnnnnnnnnnnnnnnnnnnnnnnnnnnnnnnnnnnnnnnnnnnnnnnnnnnnnnnnnnnnnnnnnnnnnnnnnnnnnnnnnnnnnnnnnnnnnnnnnnnnnnnnnnnnnnnnnnnnnnnnnnnnnnnnnnnnnnnnnnnnnnnnnnnnnnnnnnnnnnnnnnnnnnnnnnnnnnnnnnnnnnnnnnnnnnnnnnnnnnnnnnnnnnnnnnnnnnnnnnnnnnnnnnnnnnnnnnnnnnnnnnnnnnnnnnnnnnnnnnnnnnnnnnnnnnnnnnnnnnnnnnnnnnnnnnnnnnnnnnnnnnnnnnnnnnnnnnnnnnnnnnnnnnnnnnnnnnnnnnnnnnnnnnnnnnnnnnnnnnnnnnnnnnnnnnnnnnnnnnnnnnnnnnnnnnnnnnnnnnnnnnnnnnnnnnnnnnnnnnnnnnnnnnnnnnnnnnnnnnnnnnnnnnnnnnnnnnnnnnnnnnnnnnnnnnnnnnnnnnnnnnnnnnnnnnnnnnnnnnnnnnnnnnnnnnnnnnnnnnnnnnnnnnnnnnnnnnnnnnnnnnnnnnnnnnnnnnnnnnnnnnnnnnnnnnnnnnnnnnnnnnnnnnnnnnnnnnnnnnnnnnnnnnnnnnnnnnnnnnnnnnnnnnnnnnnnnnnnnnnnnnnnnnnnnnnnnnnnnnnnnnnnnnnnnnnnnnnnnnnnnnnnnnnnnnnnnnnnnnnnnnnnnnnnnnnnnnnnnnnnnnnnnnnnnnnnnnnnnnnnnnnnnnnnnnnnnnnnnnnnnnnnnnnnnnnnnnnnnnnnnnnnnnnnnnnnnnnnnnnnnnnnnnnnnnnnnnnnnnnnnnnnnnnnnnnnnnnnnnnnnnnnnnnnnnnnnnnnnnnnnnnnnnnnnnnnnnnnnnnnnnnnnnnnnnnnnnnnnnnnnnnnnnnnnnnnnnnnnnnnnnnnnnnnnnnnnnnnnnnnnnnnnnnnnnnnnnnnnnnnnnnnnnnnnnnnnnnnnnnnnnnnnnnnnnnnnnnnnnnnnnnnnnnnnnnnnnnnnnnnnnnnnnnnnnnnnnnnnnnnnnnnnnnnnnnnnnnnnnnnnnnnnnnnnnnnnnnnnnnnnnnnnnnnnnnnnnnnnnnnnnnnnnnnnnnnnnnnnnnnnnnnnnnnnnnnnnnnnnnnnnnnnnnnnnnnnnnnnnnnnnnnnnnnnnnnnnnnnnnnnnnnnnnnnnnnnnnnnnnnnnnnnnnnnnnnnnnnnnnnnnnnnnnnnnnnnnnnnnnnnnnnnnnnnnnnnnnnnnnnnnnnnnnnnnnnnnnnnnnnnnnnnnnnnnnnnnnnnnnnnnnnnnnnnnnnnnnnnnnnnnnnnnnnnnnnnnnnnnnnnnnnnnnnnnnnnnnnnnnnnnnnnnnnnnnnnnnnnnnnnnnnnnnnnnnnnnnnnnnnnnnnnnnnnnnnnnnnnnnnnnnnnnnnnnnnnnnnnnnnnnnnnnnnnnnnnnnnnnnnnnnnnnnnnnnnnnnnnnnnnnnnnnnnnnnnnnnnnnnnnnnnnnnnnnnnnnnnnnnnnnnnnnnnnnnnnnnnnnnnnnnnnnnnnnnnnnnnnnnnnnnnnnnnnnnnnnnnnnnnnnnnnnnnnnnnnnnnnnnnnnnnnnnnnnnnnnnnnnnnnnnnnnnnnnnnnnnnnnnnnnnnnnnnnnnnnnnnnnnnnnnnnnnnnnnnnnnnnnnnnnnnnnnnnnnnnnnnnnnnnnnnnnnnnnnnnnnnnnnnnnnnnnnnnnnnnnnnnnnnnnnnnnnnnnnnnnnnnnnnnnnnnnnnnnnnnnnnnnnnnnnnnnnnnnnnnnnnnnnnnnnnnnnnnnnnnnnnnnnnnnnnnnnnnnnnnnnnnnnnnnnnnnnnnnnnnnnnnnnnnnnnnnnnnnnnnnnnnnnnnnnnnnnnnnnnnnnnnnnnnnnnnnnnnnnnnnnnnnnnnnnnnnnnnnnnnnnnnnnnnnnnnnnnnnnnnnnnnnnnnnnnnnnnnnnnnnnnnnnnnnnnnnnnnnnnnnnnnnnnnnnnnnnnnnnnnnnnnnnnnnnnnnnnnnnnnnnnnnnnnnnnnnnnnnnnnnnnnnnnnnnnnnnnnnnnnnnnnnnnnnnnnnnnnnnnnnnnnnnnnnnnnnnnnnnnnnnnnnnnnnnnnnnnnnnnnnnnnnnnnnnnnnnnnnnnnnnnnnnnnnnnnnnnnnnnnnnnnnnnnnnnnnnnnnnnnnnnnnnnnnnnnnnnnnnnnnnnnnnnnnnnnnnnnnnnnnnnnnnnnnnnnnnnnnnnnnnnnnnnnnnnnnnnnnnnnnnnnnnnnnnnnnnnnnnnnnnnnnnnnnnnnnnnnnnnnnnnnnnnnnnnnnnnnnnnnnnnnnnnnnnnnnnnnnnnnnnnnnnnnnnnnnnnnnnnnnnnnnnnnnnnnnnnnnnnnnnnnnnnnnnnnnnnnnnnnnnnnnnnnnnnnnnnnnnnnnnnnnnnnnnnnnnnnnnnnnnnnnnnnnnnnnnnnnnnnnnnnnnnnnnnnnnnnnnnnnnnnnnnnnnnnnnnnnnnnnnnnnnnnnnnnnnnnnnnnnnnnnnnnnnnnnnnnnnnnnnnnnnnnnnnnnnnnnnnnnnnnnnnnnnnnnnnnnnnnnnnnnnnnnnnnnnnnnnnnnnnnnnnnnnnnnnnnnnnnnnnnnnnnnnnnnnnnnnnnnnnnnnnnnnnnnnnnnnnnnnnnnnnnnnnnnnnnnnnnnnnnnnnnnnnnnnnnnnnnnnnnnnnnnnnnnnnnnnnnnnnnnnnnnnnnnnnnnnnnnnnnnnnnnnnnnnnnnnnnnnnnnnnnnnnnnnnnnnnnnnnnnnnnnnnnnnnnnnnnnnnnnnnnnnnnnnnnnnnnnnnnnnnnnnnnnnnnnnnnnnnnnnnnnnnnnnnnnnnnnnnnnnnnnnnnnnnnnnnnnnnnnnnnnnnnnnnnnnnnnnnnnnnnnnnnnnnnnnnnnnnnnnnnnnnnnnnnnnnnnnnnnnnnnnnnnnnnnnnnnnnnnnnnnnnnnnnnnnnnnnnnnnnnnnnnnnnnnnnnnnnnnnnnnnnnnnnnnnnnnnnnnnnnnnnnnnnnnnnnnnnnnnnnnnnnnnnnnnnnnnnnnnnnnnnnnnnnnnnnnnnnnnnnnnnnnnnnnnnnnnnnnnnnnnnnnnnnnnnnnnnnnnnnnnnnnnnnnnnnnnnnnnnnnnnnnnnnnnnnnnnnnnnnnnnnnnnnnnnnnnnnnnnnnnnnnnnnnnnnnnnnnnnnnnnnnnnnnnnnnnnnnnnnnnnnnnnnnnnnnnnnnnnnnnnnnnnnnnnnnnnnnnnnnnnnnnnnnnnnnnnnnnnnnnnnnnnnnnnnnnnnnnnnnnnnnnnnnnnnnnnnnnnnnnnnnnnnnnnnnnnnnnnnnnnnnnnnnnnnnnnnnnnnnnnnnnnnnnnnnnnnnnnnnnnnnnnnnnnnnnnnnnnnnnnnnnnnnnnnnnnnnnnnnnnnnnnnnnnnnnnnnnnnnnnnnnnnnnnnnnnnnnnnnnnnnnnnnnnnnnnnnnnnnnnnnnnnnnnnnnnnnnnnnnnnnnnnnnnnnnnnnnnnnnnnnnnnnnnnnnnnnnnnnnnnnnnnnnnnnnnnnnnnnnnnnnnnnnnnnnnnnnnnnnnnnnnnnnnnnnnnnnnnnnnnnnnnnnnnnnnnnnnnnnnnnnnnnnnnnnnnnnnnnnnnnnnnnnnnnnnnnnnnnnnnnnnnnnnnnnnnnnnnnnnnnnnnnnnnnnnnnnnnnnnnnnnnnnnnnnnnnnnnnnnnnnnnnnnnnnnnnnnnnnnnnnnnnnnnnnnnnnnnnnnnnnnnnnnnnnnnnnnnnnnnnnnnnnnnnnnnnnnnnnnnnnnnnnnnnnnnnnnnnnnnnnnnnnnnnnnnnnnnnnnnnnnnnnnnnnnnnnnnnnnnnnnnnnnnnnnnnnnnnnnnnnnnnnnnnnnnnnnnnnnnnnnnnnnnnnnnnnnnnnnnnnnnnnnnnnnnnnnnnnnnnnnnnnnnnnnnnnnnnnnnnnnnnnnnnnnnnnnnnnnnnnnnnnnnnnnnnnnnnnnnnnnnnnnnnnnnnnnnnnnnnnnnnnnnnnnnnnnnnnnnnnnnnnnnnnnnnnnnnnnnnnnnnnnnnnnnnnnnnnnnnnnnnnnnnnnnnnnnnnnnnnnnnnnnnnnnnnnnnnnnnnnnnnnnnnnnnnnnnnnnnnnnnnnnnnnnnnnnnnnnnnnnnnnnnnnnnnnnnnnnnnnnnnnnnnnnnnnnnnnnnnnnnnnnnnnnnnnnnnnnnnnnnnnnnnnnnnnnnnnnnnnnnnnnnnnnnnnnnnnnnnnnnnnnnnnnnnnnnnnnnnnnnnnnnnnnnnnnnnnnnnnnnnnnnnnnnnnnnnnnnnnnnnnnnnnnnnnnnnnnnnnnnnnnnnnnnnnnnnnnnnnnnnnnnnnnnnnnnnnnnnnnnnnnnnnnnnnnnnnnnnnnnnnnnnnnnnnnnnnnnnnnnnnnnnnnnnnnnnnnnnnnnnnnnnnnnnnnnnnnnnnnnnnnnnnnnnnnnnnnnnnnnnnnnnnnnnnnnnnnnnnnnnnnnnnnnnnnnnnnnnnnnnnnnnnnnnnnnnnnnnnnnnnnnnnnnnnnnnnnnnnnnnnnnnnnnnnnnnnnnnnnnnnnnnnnnnnnnnnnnnnnnnnnnnnnnnnnnnnnnnnnnnnnnnnnnnnnnnnnnnnnnnnnnnnnnnnnnnnnnnnnnnnnnnnnnnnnnnnnnnnnnnnnnnnnnnnnnnnnnnnnnnnnnnnnnnnnnnnnnnnnnnnnnnnnnnnnnnnnnnnnnnnnnnnnnnnnnnnnnnnnnnnnnnnnnnnnnnnnnnnnnnnnnnnnnnnnnnnnnnnnnnnnnnnnnnnnnnnnnnnnnnnnnnnnnnnnnnnnnnnnnnnnnnnnnnnnnnnnnnnnnnnnnnnnnnnnnnnnnnnnnnnnnnnnnnnnnnnnnnnnnnnnnnnnnnnnnnnnnnnnnnnnnnnnnnnnnnnnnnnnnnnnnnnnnnnnnnnnnnnnnnnnnnnnnnnnnnnnnnnnnnnnnnnnnnnnnnnnnnnnnnnnnnnnnnnnnnnnnnnnnnnnnnnnnnnnnnnnnnnnnnnnnnnnnnnnnnnnnnnnnnnnnnnnnnnnnnnnnnnnnnnnnnnnnnnnnnnnnnnnnnnnnnnnnnnnnnnnnnnnnnnnnnnnnnnnnnnnnnnnnnnnnnnnnnnnnnnnnnnnnnnnnnnnnnnnnnnnnnnnnnnnnnnnnnnnnnnnnnnnnnnnnnnnnnnnnnnnnnnnnnnnnnnnnnnnnnnnnnnnnnnnnnnnnnnnnnnnnnnnnnnnnnnnnnnnnnnnnnnnnnnnnnnnnnnnnnnnnnnnnnnnnnnnnnnnnnnnnnnnnnnnnnnnnnnnnnnnnnnnnnnnnnnnnnnnnnnnnnnnnnnnnnnnnnnnnnnnnnnnnnnnnnnnnnnnnnnnnnnnnnnnnnnnnnnnnnnnnnnnnnnnnnnnnnnnnnnnnnnnnnnnnnnnnnnnnnnnnnnnnnnnnnnnnnnnnnnnnnnnnnnnnnnnnnnnnnnnnnnnnnnnnnnnnnnnnnnnnnnnnnnnnnnnnnnnnnnnnnnnnnnnnnnnnnnnnnnnnnnnnnnnnnnnnnnnnnnnnnnnnnnnnnnnnnnnnnnnnnnnnnnnnnnnnnnnnnnnnnnnnnnnnnnnnnnnnnnnnnnnnnnnnnnnnnnnnnnnnnnnnnnnnnnnnnnnnnnnnnnnnnnnnnnnnnnnnnnnnnnnnnnnnnnnnnnnnnnnnnnnnnnnnnnnnnnnnnnnnnnnnnnnnnnnnnnnnnnnnnnnnnnnnnnnnnnnnnnnnnnnnnnnnnnnnnnnnnnnnnnnnnnnnnnnnnnnnnnnnnnnnnnnnnnnnnnnnnnnnnnnnnnnnnnnnnnnnnnnnnnnnnnnnnnnnnnnnnnnnnnnnnnnnnnnnnnnnnnnnnnnnnnnnnnnnnnnnnnnnnnnnnnnnnnnnnnnnnnnnnnnnnnnnnnnnnnnnnnnnnnnnnnnnnnnnnnnnnnnnnnnnnnnnnnnnnnnnnnnnnnnnnnnnnnnnnnnnnnnnnnnnnnnnnnnnnnnnnnnnnnnnnnnnnnnnnnnnnnnnnnnnnnnnnnnnnnnnnnnnnnnnnnnnnnnnnnnnnnnnnnnnnnnnnnnnnnnnnnnnnnnnnnnnnnnnnnnnnnnnnnnnnnnnnnnnnnnnnnnnnnnnnnnnnnnnnnnnnnnnnnnnnnnnnnnnnnnnnnnnnnnnnnnnnnnnnnnnnnnnnnnnnnnnnnnnnnnnnnnnnnnnnnnnnnnnnnnnnnnnnnnnnnnnnnnnnnnnnnnnnnnnnnnnnnnnnnnnnnnnnnnnnnnnnnnnnnnnnnnnnnnnnnnnnnnnnnnnnnnnnnnnnnnnnnnnnnnnnnnnnnnnnnnnnnnnnnnnnnnnnnnnnnnnnnnnnnnnnnnnnnnnnnnnnnnnnnnnnnnnnnnnnnnnnnnnnnnnnnnnnnnnnnnnnnnnnnnnnnnnnnnnnnnnnnnnnnnnnnnnnnnnnnnnnnnnnnnnnnnnnnnnnnnnnnnnnnnnnnnnnnnnnnnnnnnnnnnnnnnnnnnnnnnnnnnnnnnnnnnnnnnnnnnnnnnnnnnnnnnnnnnnnnnnnnnnnnnnnnnnnnnnnnnnnnnnnnnnnnnnnnnnnnnnnnnnnnnnnnnnnnnnnnnnnnnnnnnnnnnnnnnnnnnnnnnnnnnnnnnnnnnnnnnnnnnnnnnnnnnnnnnnnnnnnnnnnnnnnnnnnnnnnnnnnnnnnnnnnnnnnnnnnnnnnnnnnnnnnnnnnnnnnnnnnnnnnnnnnnnnnnnnnnnnnnnnnnnnnnnnnnnnnnnnnnnnnnnnnnnnnnnnnnnnnnnnnnnnnnnnnnnnnnnnnnnnnnnnnnnnnnnnnnnnnnnnnnnnnnnnnnnnnnnnnnnnnnnnnnnnnnnnnnnnnnnnnnnnnnnnnnnnnnnnnnnnnnnnnnnnnnnnnnnnnnnnnnnnnnnnnnnnnnnnnnnnnnnnnnnnnnnnnnnnnnnnnnnnnnnnnnnnnnnnnnnnnnnnnnnnnnnnnnnnnnnnnnnnnnnnnnnnnnnnnnnnnnnnnnnnnnnnnnnnnnnnnnnnnnnnnnnnnnnnnnnnnnnnnnnnnnnnnnnnnnnnnnnnnnnnnnnnnnnnnnnnnnnnnnnnnnnnnnnnnnnnnnnnnnnnnnnnnnnnnnnnnnnnnnnnnnnnnnnnnnnnnnnnnnnnnnnnnnnnnnnnnnnnnnnnnnnnnnnnnnnnnnnnnnnnnnnnnnnnnnnnnnnnnnnnnnnnnnnnnnnnnnnnnnnnnnnnnnnnnnnnnnnnnnnnnnnnnnnnnnnnnnnnnnnnnnnnnnnnnnnnnnnnnnnnnnnnnnnnnnnnnnnnnnnnnnnnnnnnnnnnnnnnnnnnnnnnnnnnnnnnnnnnnnnnnnnnnnnnnnnnnnnnnnnnnnnnnnnnnnnnnnnnnnnnnnnnnnnnnnnnnnnnnnnnnnnnnnnnnnnnnnnnnnnnnnnnnnnnnnnnnnnnnnnnnnnnnnnnnnnnnnnnnnnnnnnnnnnnnnnnnnnnnnnnnnnnnnnnnnnnnnnnnnnnnnnnnnnnnnnnnnnnnnnnnnnnnnnnnnnnnnnnnnnnnnnnnnnnnnnnnnnnnnnnnnnnnnnnnnnnnnnnnnnnnnnnnnnnnnnnnnnnnnnnnnnnnnnnnnnnnnnnnnnnnnnnnnnnnnnnnnnnnnnnnnnnnnnnnnnnnnnnnnnnnnnnnnnnnnnnnnnnnnnnnnnnnnnnnnnnnnnnnnnnnnnnnnnnnnnnnnnnnnnnnnnnnnnnnnnnnnnnnnnnnnnnnnnnnnnnnnnnnnnnnnnnnnnnnnnnnnnnnnnnnnnnnnnnnnnnnnnnnnnnnnnnnnnnnnnnnnnnnnnnnnnnnnnnnnnnnnnnnnnnnnnnnnnnnnnnnnnnnnnnnnnnnnnnnnnnnnnnnnnnnnnnnnnnnnnnnnnnnnnnnnnnnnnnnnnnnnnnnnnnnnnnnnnnnnnnnnnnnnnnnnnnnnnnnnnnnnnnnnnnnnnnnnnnnnnnnnnnnnnnnnnnnnnnnnnnnnnnnnnnnnnnnnnnnnnnnnnnnnnnnnnnnnnnnnnnnnnnnnnnnnnnnnnnnnnnnnnnnnnnnnnnnnnnnnnnnnnnnnnnnnnnnnnnnnnnnnnnnnnnnnnnnnnnnnnnnnnnnnnnnnnnnnnnnnnnnnnnnnnnnnnnnnnnnnnnnnnnnnnnnnnnnnnnnnnnnnnnnnnnnnnnnnnnnnnnnnnnnnnnnnnnnnnnnnnnnnnnnnnnnnnnnnnnnnnnnnnnnnnnnnnnnnnnnnnnnnnnnnnnnnnnnnnnnnnnnnnnnnnnnnnnnnnnnnnnnnnnnnnnnnnnnnnnnnnnnnnnnnnnnnnnnnnnnnnnnnnnnnnnnnnnnnnnnnnnnnnnnnnnnnnnnnnnnnnnnnnnnnnnnnnnnnnnnnnnnnnnnnnnnnnnnnnnnnnnnnnnnnnnnnnnnnnnnnnnnnnnnnnnnnnnnnnnnnnnnnnnnnnnnnnnnnnnnnnnnnnnnnnnnnnnnnnnnnnnnnnnnnnnnnnnnnnnnnnnnnnnnnnnnnnnnnnnnnnnnnnnnnnnnnnnnnnnnnnnnnnnnnnnnnnnnnnnnnnnnnnnnnnnnnnnnnnnnnnnnnnnnnnnnnnnnnnnnnnnnnnnnnnnnnnnnnnnnnnnnnnnnnnnnnnnnnnnnnnnnnnnnnnnnnnnnnnnnnnnnnnnnnnnnnnnnnnnnnnnnnnnnnnnnnnnnnnnnnnnnnnnnnnnnnnnnnnnnnnnnnnnnnnnnnnnnnnnnnnnnnnnnnnnnnnnnnnnnnnnnnnnnnnnnnnnnnnnnnnnnnnnnnnnnnnnnnnnnnnnnnnnnnnnnnnnnnnnnnnnnnnnnnnnnnnnnnnnnnnnnnnnnnnnnnnnnnnnnnnnnnnnnnnnnnnnnnnnnnnnnnnnnnnnnnnnnnnnnnnnnnnnnnnnnnnnnnnnnnnnnnnnnnnnnnnnnnnnnnnnnnnnnnnnnnnnnnnnnnnnnnnnnnnnnnnnnnnnnnnnnnnnnnnnnnnnnnnnnnnnnnnnnnnnnnnnnnnnnnnnnnnnnnnnnnnnnnnnnnnnnnnnnnnnnnnnnnnnnnnnnnnnnnnnnnnnnnnnnnnnnnnnnnnnnnnnnnnnnnnnnnnnnnnnnnnnnnnnnnnnnnnnnnnnnnnnnnnnnnnnnnnnnnnnnnnnnnnnnnnnnnnnnnnnnnnnnnnnnnnnnnnnnnnnnnnnnnnnnnnnnnnnnnnnnnnnnnnnnnnnnnnnnnnnnnnnnnnnnnnnnnnnnnnnnnnnnnnnnnnnnnnnnnnnnnnnnnnnnnnnnnnnnnnnnnnnnnnnnnnnnnnnnnnnnnnnnnnnnnnnnnnnnnnnnnnnnnnnnnnnnnnnnnnnnnnnnnnnnnnnnnnnnnnnnnnnnnnnnnnnnnnnnnnnnnnnnnnnnnnnnnnnnnnnnnnnnnnnnnnnnnnnnnnnnnnnnnnnnnnnnnnnnnnnnnnnnnnnnnnnnnnnnnnnnnnnnnnnnnnnnnnnnnnnnnnnnnnnnnnnnnnnnnnnnnnnnnnnnnnnnnnnnnnnnnnnnnnnnnnnnnnnnnnnnnnnnnnnnnnnnnnnnnnnnnnnnnnnnnnnnnnnnnnnnnnnnnnnnnnnnnnnnnnnnnnnnnnnnnnnnnnnnnnnnnnnnnnnnnnnnnnnnnnnnnnnnnnnnnnnnnnnnnnnnnnnnnnnnnnnnnnnnnnnnnnnnnnnnnnnnnnnnnnnnnnnnnnnnnnnnnnnnnnnnnnnnnnnnnnnnnnnnnnnnnnnnnnnnnnnnnnnnnnnnnnnnnnnnnnnnnnnnnnnnnnnnnnnnnnnnnnnnnnnnnnnnnnnnnnnnnnnnnnnnnnnnnnnnnnnnnnnnnnnnnnnnnnnnnnnnnnnnnnnnnnnnnnnnnnnnnnnnnnnnnnnnnnnnnnnnnnnnnnnnnnnnnnnnnnnnnnnnnnnnnnnnnnnnnnnnnnnnnnnnnnnnnnnnnnnnnnnnnnnnnnnnnnnnnnnnnnnnnnnnnnnnnnnnnnnnnnnnnnnnnnnnnnnnnnnnnnnnnnnnnnnnnnnnnnnnnnnnnnnnnnnnnnnnnnnnnnnnnnnnnnnnnnnnnnnnnnnnnnnnnnnnnnnnnnnnnnnnnnnnnnnnnnnnnnnnnnnnnnnnnnnnnnnnnnnnnnnnnnnnnnnnnnnnnnnnnnnnnnnnnnnnnnnnnnnnnnnnnnnnnnnnnnnnnnnnnnnnnnnnnnnnnnnnnnnnnnnnnnnnnnnnnnnnnnnnnnnnnnnnnnnnnnnnnnnnnnnnnnnnnnnnnnnnnnnnnnnnnnnnnnnnnnnnnnnnnnnnnnnnnnnnnnnnnnnnnnnnnnnnnnnnnnnnnnnnnnnnnnnnnnnnnnnnnnnnnnnnnnnnnnnnnnnnnnnnnnnnnnnnnnnnnnnnnnnnnnnnnnnnnnnnnnnnnnnnnnnnnnnnnnnnnnnnnnnnnnnnnnnnnnnnnnnnnnnnnnnnnnnnnnnnnnnnnnnnnnnnnnnnnnnnnnnnnnnnnnnnnnnnnnnnnnnnnnnnnnnnnnnnnnnnnnnnnnnnnnnnnnnnnnnnnnnnnnnnnnnnnnnnnnnnnnnnnnnnnnnnnnnnnnnnnnnnnnnnnnnnnnnnnnnnnnnnnnnnnnnnnnnnnnnnnnnnnnnnnnnnnnnnnnnnnnnnnnnnnnnnnnnnnnnnnnnnnnnnnnnnnnnnnnnnnnnnnnnnnnnnnnnnnnnnnnnnnnnnnnnnnnnnnnnnnnnnnnnnnnnnnnnnnnnnnnnnnnnnnnnnnnnnnnnnnnnnnnnnnnnnnnnnnnnnnnnnnnnnnnnnnnnnnnnnnnnnnnnnnnnnnnnnnnnnnnnnnnnnnnnnnnnnnnnnnnnnnnnnnnnnnnnnnnnnnnnnnnnnnnnnnnnnnnnnnnnnnnnnnnnnnnnnnnnnnnnnnnnnnnnnnnnnnnnnnnnnnnnnnnnnnnnnnnnnnnnnnnnnnnnnnnnnnnnnnnnnnnnnnnnnnnnnnnnnnnnnnnnnnnnnnnnnnnnnnnnnnnnnnnnnnnnnnnnnnnnnnnnnnnnnnnnnnnnnnnnnnnnnnnnnnnnnnnnnnnnnnnnnnnnnnnnnnnnnnnnnnnnnnnnnnnnnnnnnnnnnnnnnnnnnnnnnnnnnnnnnnnnnnnnnnnnnnnnnnnnnnnnnnnnnnnnnnnnnnnnnnnnnnnnnnnnnnnnnnnnnnnnnnnnnnnnnnnnnnnnnnnnnnnnnnnnnnnnnnnnnnnnnnnnnnnnnnnnnnnnnnnnnnnnnnnnnnnnnnnnnnnnnnnnnnnnnnnnnnnnnnnnnnnnnnnnnnnnnnnnnnnnnnnnnnnnnnnnnnnnnnnnnnnnnnnnnnnnnnnnnnnnnnnnnnnnnnnnnnnnnnnnnnnnnnnnnnnnnnnnnnnnnnnnnnnnnnnnnnnnnnnnnnnnnnnnnnnnnnnnnnnnnnnnnnnnnnnnnnnnnnnnnnnnnnnnnnnnnnnnnnnnnnnnnnnnnnnnnnnnnnnnnnnnnnnnnnnnnnnnnnnnnnnnnnnnnnnnnnnnnnnnnnnnnnnnnnnnnnnnnnnnnnnnnnnnnnnnnnnnnnnnnnnnnnnnnnnnnnnnnnnnnnnnnnnnnnnnnnnnnnnnnnnnnnnnnnnnnnnnnnnnnnnnnnnnnnnnnnnnnnnnnnnnnnnnnnnnnnnnnnnnnnnnnnnnnnnnnnnnnnnnnnnnnnnnnnnnnnnnnnnnnnnnnnnnnnnnnnnnnnnnnnnnnnnnnnnnnnnnnnnnnnnnnnnnnnnnnnnnnnnnnnnnnnnnnnnnnnnnnnnnnnnnnnnnnnnnnnnnnnnnnnnnnnnnnnnnnnnnnnnnnnnnnnnnnnnnnnnnnnnnnnnnnnnnnnnnnnnnnnnnnnnnnnnnnnnnnnnnnnnnnnnnnnnnnnnnnnnnnnnnnnnnnnnnnnnnnnnnnnnnnnnnnnnnnnnnnnnnnnnnnnnnnnnnnnnnnnnnnnnnnnnnnnnnnnnnnnnnnnnnnnnnnnnnnnnnnnnnnnnnnnnnnnnnnnnnnnnnnnnnnnnnnnnnnnnnnnnnnnnnnnnnnnnnnnnnnnnnnnnnnnnnnnnnnnnnnnnnnnnnnnnnnnnnnnnnnnnnnnnnnnnnnnnnnnnnnnnnnnnnnnnnnnnnnnnnnnnnnnnnnnnnnnnnnnnnnnnnnnnnnnnnnnnnnnnnnnnnnnnnnnnnnnnnnnnnnnnnnnnnnnnnnnnnnnnnnnnnnnnnnnnnnnnnnnnnnnnnnnnnnnnnnnnnnnnnnnnnnnnnnnnnnnnnnnnnnnnnnnnnnnnnnnnnnnnnnnnnnnnnnnnnnnnnnnnnnnnnnnnnnnnnnnnnnnnnnnnnnnnnnnnnnnnnnnnnnnnnnnnnnnnnnnnnnnnnnnnnnnnnnnnnnnnnnnnnnnnnnnnnnnnnnnnnnnnnnnnnnnnnnnnnnnnnnnnnnnnnnnnnnnnnnnnnnnnnnnnnnnnnnnnnnnnnnnnnnnnnnnnnnnnnnnnnnnnnnnnnnnnnnnnnnnnnnnnnnnnnnnnnnnnnnnnnnnnnnnnnnnnnnnnnnnnnnnnnnnnnnnnnnnnnnnnnnnnnnnnnnnnnnnnnnnnnnnnnnnnnnnnnnnnnnnnnnnnnnnnnnnnnnnnnnnnnnnnnnnnnnnnnnnnnnnnnnnnnnnnnnnnnnnnnnnnnnnnnnnnnnnnnnnnnnnnnnnnnnnnnnnnnnnnnnnnnnnnnnnnnnnnnnnnnnnnnnnnnnnnnnnnnnnnnnnnnnnnnnnnnnnnnnnnnnnnnnnnnnnnnnnnnnnnnnnnnnnnnnnnnnnnnnnnnnnnnnnnnnnnnnnnnnnnnnnnnnnnnnnnnnnnnnnnnnnnnnnnnnnnnnnnnnnnnnnnnnnnnnnnnnnnnnnnnnnnnnnnnnnnnnnnnnnnnnnnnnnnnnnnnnnnnnnnnnnnnnnnnnnnnnnnnnnnnnnnnnnnnnnnnnnnnnnnnnnnnnnnnnnnnnnnnnnnnnnnnnnnnnnnnnnnnnnnnnnnnnnnnnnnnnnnnnnnnnnnnnnnnnnnnnnnnnnnnnnnnnnnnnnnnnnnnnnnnnnnnnnnnnnnnnnnnnnnnnnnnnnnnnnnnnnnnnnnnnnnnnnnnnnnnnnnnnnnnnnnnnnnnnnnnnnnnnnnnnnnnnnnnnnnnnnnnnnnnnnnnnnnnnnnnnnnnnnnnnnnnnnnnnnnnnnnnnnnnnnnnnnnnnnnnnnnnnnnnnnnnnnnnnnnnnnnnnnnnnnnnnnnnnnnnnnnnnnnnnnnnnnnnnnnnnnnnnnnnnnnnnnnnnnnnnnnnnnnnnnnnnnnnnnnnnnnnnnnnnnnnnnnnnnnnnnnnnnnnnnnnnnnnnnnnnnnnnnnnnnnnnnnnnnnnnnnnnnnnnnnnnnnnnnnnnnnnnnnnnnnnnnnnnnnnnnnnnnnnnnnnnnnnnnnnnnnnnnnnnnnnnnnnnnnnnnnnnnnnnnnnnnnnnnnnnnnnnnnnnnnnnnnnnnnnnnnnnnnnnnnnnnnnnnnnnnnnnnnnnnnnnnnnnnnnnnnnnnnnnnnnnnnnnnnnnnnnnnnnnnnnnnnnnnnnnnnnnnnnnnnnnnnnnnnnnnnnnnnnnnnnnnnnnnnnnnnnnnnnnnnnnnnnnnnnnnnnnnnnnnnnnnnnnnnnnnnnnnnnnnnnnnnnnnnnnnnnnnnnnnnnnnnnnnnnnnnnnnnnnnnnnnnnnnnnnnnnnnnnnnnnnnnnnnnnnnnnnnnnnnnnnnnnnnnnnnnnnnnnnnnnnnnnnnnnnnnnnnnnnnnnnnnnnnnnnnnnnnnnnnnnnnnnnnnnnnnnnnnnnnnnnnnnnnnnnnnnnnnnnnnnnnnnnnnnnnnnnnnnnnnnnnnnnnnnnnnnnnnnnnnnnnnnnnnnnnnnnnnnnnnnnnnnnnnnnnnnnnnnnnnnnnnnnnnnnnnnnnnnnnnnnnnnnnnnnnnnnnnnnnnnnnnnnnnnnnnnnnnnnnnnnnnnnnnnnnnnnnnnnnnnnnnnnnnnnnnnnnnnnnnnnnnnnnnnnnnnnnnnnnnnnnnnnnnnnnnnnnnnnnnnnnnnnnnnnnnnnnnnnnnnnnnnnnnnnnnnnnnnnnnnnnnnnnnnnnnnnnnnnnnnnnnnnnnnnnnnnnnnnnnnnnnnnnnnnnnnnnnnnnnnnnnnnnnnnnnnnnnnnnnnnnnnnnnnnnnnnnnnnnnnnnnnnnnnnnnnnnnnnnnnnnnnnnnnnnnnnnnnnnnnnnnnnnnnnnnnnnnnnnnnnnnnnnnnnnnnnnnnnnnnnnnnnnnnnnnnnnnnnnnnnnnnnnnnnnnnnnnnnnnnnnnnnnnnnnnnnnnnnnnnnnnnnnnnnnnnnnnnnnnnnnnnnnnnnnnnnnnnnnnnnnnnnnnnnnnnnnnnnnnnnnnnnnnnnnnnnnnnnnnnnnnnnnnnnnnnnnnnnnnnnnnnnnnnnnnnnnnnnnnnnnnnnnnnnnnnnnnnnnnnnnnnnnnnnnnnnnnnnnnnnnnnnnnnnnnnnnnnnnnnnnnnnnnnnnnnnnnnnnnnnnnnnnnnnnnnnnnnnnnnnnnnnnnnnnnnnnnnnnnnnnnnnnnnnnnnnnnnnnnnnnnnnnnnnnnnnnnnnnnnnnnnnnnnnnnnnnnnnnnnnnnnnnnnnnnnnnnnnnnnnnnnnnnnnnnnnnnnnnnnnnnnnnnnnnnnnnnnnnnnnnnnnnnnnnnnnnnnnnnnnnnnnnnnnnnnnnnnnnnnnnnnnnnnnnnnnnnnnnnnnnnnnnnnnnnnnnnnnnnnnnnnnnnnnnnnnnnnnnnnnnnnnnnnnnnnnnnnnnnnnnnnnnnnnnnnnnnnnnnnnnnnnnnnnnnnnnnnnnnnnnnnnnnnnnnnnnnnnnnnnnnnnnnnnnnnnnnnnnnnnnnnnnnnnnnnnnnnnnnnnnnnnnnnnnnnnnnnnnnnnnnnnnnnnnnnnnnnnnnnnnnnnnnnnnnnnnnnnnnnnnnnnnnnnnnnnnnnnnnnnnnnnnnnnnnnnnnnnnnnnnnnnnnnnnnnnnnnnnnnnnnnnnnnnnnnnnnnnnnnnnnnnnnnnnnnnnnnnnnnnnnnnnnnnnnnnnnnnnnnnnnnnnnnnnnnnnnnnnnnnnnnnnnnnnnnnnnnnnnnnnnnnnnnnnnnnnnnnnnnnnnnnnnnnnnnnnnnnnnnnnnnnnnnnnnnnnnnnnnnnnnnnnnnnnnnnnnnnnnnnnnnnnnnnnnnnnnnnnnnnnnnnnnnnnnnnnnnnnnnnnnnnnnnnnnnnnnnnnnnnnnnnnnnnnnnnnnnnnnnnnnnnnnnnnnnnnnnnnnnnnnnnnnnnnnnnnnnnnnnnnnnnnnnnnnnnnnnnnnnnnnnnnnnnnnnnnnnnnnnnnnnnnnnnnnnnnnnnnnnnnnnnnnnnnnnnnnnnnnnnnnnnnnnnnnnnnnnnnnnnnnnnnnnnnnnnnnnnnnnnnnnnnnnnnnnnnnnnnnnnnnnnnnnnnnnnnnnnnnnnnnnnnnnnnnnnnnnnnnnnnnnnnnnnnnnnnnnnnnnnnnnnnnnnnnnnnnnnnnnnnnnnnnnnnnnnnnnnnnnnnnnnnnnnnnnnnnnnnnnnnnnnnnnnnnnnnnnnnnnnnnnnnnnnnnnnnnnnnnnnnnnnnnnnnnnnnnnnnnnnnnnnnnnnnnnnnnnnnnnnnnnnnnnnnnnnnnnnnnnnnnnnnnnnnnnnnnnnnnnnnnnnnnnnnnnnnnnnnnnnnnnnnnnnnnnnnnnnnnnnnnnnnnnnnnnnnnnnnnnnnnnnnnnnnnnnnnnnnnnnnnnnnnnnnnnnnnnnnnnnnnnnnnnnnnnnnnnnnnnnnnnnnnnnnnnnnnnnnnnnnnnnnnnnnnnnnnnnnnnnnnnnnnnnnnnnnnnnnnnnnnnnnnnnnnnnnnnnnnnnnnnnnnnnnnnnnnnnnnnnnnnnnnnnnnnnnnnnnnnnnnnnnnnnnnnnnnnnnnnnnnnnnnnnnnnnnnnnnnnnnnnnnnnnnnnnnnnnnnnnnnnnnnnnnnnnnnnnnnnnnnnnnnnnnnnnnnnnnnnnnnnnnnnnnnnnnnnnnnnnnnnnnnnnnnnnnnnnnnnnnnnnnnnnnnnnnnnnnnnnnnnnnnnnnnnnnnnnnnnnnnnnnnnnnnnnnnnnnnnnnnnnnnnnnnnnnnnnnnnnnnnnnnnnnnnnnnnnnnnnnnnnnnnnnnnnnnnnnnnnnnnnnnnnnnnnnnnnnnnnnnnnnnnnnnnnnnnnnnnnnnnnnnnnnnnnnnnnnnnnnnnnnnnnnnnnnnnnnnnnnnnnnnnnnnnnnnnnnnnnnnnnnnnnnnnnnnnnnnnnnnnnnnnnnnnnnnnnnnnnnnnnnnnnnnnnnnnnnnnnnnnnnnnnnnnnnnnnnnnnnnnnnnnnnnnnnnnnnnnnnnnnnnnnnnnnnnnnnnnnnnnnnnnnnnnnnnnnnnnnnnnnnnnnnnnnnnnnnnnnnnnnnnnnnnnnnnnnnnnnnnnnnnnnnnnnnnnnnnnnnnnnnnnnnnnnnnnnnnnnnnnnnnnnnnnnnnnnnnnnnnnnnnnnnnnnnnnnnnnnnnnnnnnnnnnnnnnnnnnnnnnnnnnnnnnnnnnnnnnnnnnnnnnnnnnnnnnnnnnnnnnnnnnnnnnnnnnnnnnnnnnnnnnnnnnnnnnnnnnnnnnnnnnnnnnnnnnnnnnnnnnnnnnnnnnnnnnnnnnnnnnnnnnnnnnnnnnnnnnnnnnnnnnnnnnnnnnnnnnnnnnnnnnnnnnnnnnnnnnnnnnnnnnnnnnnnnnnnnnnnnnnnnnnnnnnnnnnnnnnnnnnnnnnnnnnnnnnnnnnnnnnnnnnnnnnnnnnnnnnnnnnnnnnnnnnnnnnnnnnnnnnnnnnnnnnnnnnnnnnnnnnnnnnnnnnnnnnnnnnnnnnnnnnnnnnnnnnnnnnnnnnnnnnnnnnnnnnnnnnnnnnnnnnnnnnnnnnnnnnnnnnnnnnnnnnnnnnnnnnnnnnnnnnnnnnnnnnnnnnnnnnnnnnnnnnnnnnnnnnnnnnnnnnnnnnnnnnnnnnnnnnnnnnnnnnnnnnnnnnnnnnnnnnnnnnnnnnnnnnnnnnnnnnnnnnnnnnnnnnnnnnnnnnnnnnnnnnnnnnnnnnnnnnnnnnnnnnnnnnnnnnnnnnnnnnnnnnnnnnnnnnnnnnnnnnnnnnnnnnnnnnnnnnnnnnnnnnnnnnnnnnnnnnnnnnnnnnnnnnnnnnnnnnnnnnnnnnnnnnnnnnnnnnnnnnnnnnnnnnnnnnnnnnnnnnnnnnnnnnnnnnnnnnnnnnnnnnnnnnnnnnnnnnnnnnnnnnnnnnnnnnnnnnnnnnnnnnnnnnnnnnnnnnnnnnnnnnnnnnnnnnnnnnnnnnnnnnnnnnnnnnnnnnnnnnnnnnnnnnnnnnnnnnnnnnnnnnnnnnnnnnnnnnnnnnnnnnnnnnnnnnnnnnnnnnnnnnnnnnnnnnnnnnnnnnnnnnnnnnnnnnnnnnnnnnnnnnnnnnnnnnnnnnnnnnnnnnnnnnnnnnnnnnnnnnnnnnnnnnnnnnnnnnnnnnnnnnnnnnnnnnnnnnnnnnnnnnnnnnnnnnnnnnnnnnnnnnnnnnnnnnnnnnnnnnnnnnnnnnnnnnnnnnnnnnnnnnnnnnnnnnnnnnnnnnnnnnnnnnnnnnnnnnnnnnnnnnnnnnnnnnnnnnnnnnnnnnnnnnnnnnnnnnnnnnnnnnnnnnnnnnnnnnnnnnnnnnnnnnnnnnnnnnnnnnnnnnnnnnnnnnnnnnnnnnnnnnnnnnnnnnnnnnnnnnnnnnnnnnnnnnnnnnnnnnnnnnnnnnnnnnnnnnnnnnnnnnnnnnnnnnnnnnnnnnnnnnnnnnnnnnnnnnnnnnnnnnnnnnnnnnnnnnnnnnnnnnnnnnnnnnnnnnnnnnnnnnnnnnnnnnnnnnnnnnnnnnnnnnnnnnnnnnnnnnnnnnnnnnnnnnnnnnnnnnnnnnnnnnnnnnnnnnnnnnnnnnnnnnnnnnnnnnnnnnnnnnnnnnnnnnnnnnnnnnnnnnnnnnnnnnnnnnnnnnnnnnnnnnnnnnnnnnnnnnnnnnnnnnnnnnnnnnnnnnnnnnnnnnnnnnnnnnnnnnnnnnnnnnnnnnnnnnnnnnnnnnnnnnnnnnnnnnnnnnnnnnnnnnnnnnnnnnnnnnnnnnnnnnnnnnnnnnnnnnnnnnnnnnnnnnnnnnnnnnnnnnnnnnnnnnnnnnnnnnnnnnnnnnnnnnnnnnnnnnnnnnnnnnnnnnnnnnnnnnnnnnnnnnnnnnnnnnnnnnnnnnnnnnnnnnnnnnnnnnnnnnnnnnnnnnnnnnnnnnnnnnnnnnnnnnnnnnnnnnnnnnnnnnnnnnnnnnnnnnnnnnnnnnnnnnnnnnnnnnnnnnnnnnnnnnnnnnnnnnnnnnnnnnnnnnnnnnnnnnnnnnnnnnnnnnnnnnnnnnnnnnnnnnnnnnnnnnnnnnnnnnnnnnnnnnnnnnnnnnnnnnnnnnnnnnnnnnnnnnnnnnnnnnnnnnnnnnnnnnnnnnnnnnnnnnnnnnnnnnnnnnnnnnnnnnnnnnnnnnnnnnnnnnnnnnnnnnnnnnnnnnnnnnnnnnnnnnnnnnnnnnnnnnnnnnnnnnnnnnnnnnnnnnnnnnnnnnnnnnnnnnnnnnnnnnnnnnnnnnnnnnnnnnnnnnnnnnnnnnnnnnnnnnnnnnnnnnnnnnnnnnnnnnnnnnnnnnnnnnnnnnnnnnnnnnnnnnnnnnnnnnnnnnnnnnnnnnnnnnnnnnnnnnnnnnnnnnnnnnnnnnnnnnnnnnnnnnnnnnnnnnnnnnnnnnnnnnnnnnnnnnnnnnnnnnnnnnnnnnnnnnnnnnnnnnnnnnnnnnnnnnnnnnnnnnnnnnnnnnnnnnnnnnnnnnnnnnnnnnnnnnnnnnnnnnnnnnnnnnnnnnnnnnnnnnnnnnnnnnnnnnnnnnnnnnnnnnnnnnnnnnnnnnnnnnnnnnnnnnnnnnnnnnnnnnnnnnnnnnnnnnnnnnnnnnnnnnnnnnnnnnnnnnnnnnnnnnnnnnnnnnnnnnnnnnnnnnnnnnnnnnnnnnnnnnnnnnnnnnnnnnnnnnnnnnnnnnnnnnnnnnnnnnnnnnnnnnnnnnnnnnnnnnnnnnnnnnnnnnnnnnnnnnnnnnnnnnnnnnnnnnnnnnnnnnnnnnnnnnnnnnnnnnnnnnnnnnnnnnnnnnnnnnnnnnnnnnnnnnnnnnnnnnnnnnnnnnnnnnnnnnnnnnnnnnnnnnnnnnnnnnnnnnnnnnnnnnnnnnnnnnnnnnnnnnnnnnnnnnnnnnnnnnnnnnnnnnnnnnnnnnnnnnnnnnnnnnnnnnnnnnnnnnnnnnnnnnnnnnnnnnnnnnnnnnnnnnnnnnnnnnnnnnnnnnnnnnnnnnnnnnnnnnnnnnnnnnnnnnnnnnnnnnnnnnnnnnnnnnnnnnnnnnnnnnnnnnnnnnnnnnnnnnnnnnnnnnnnnnnnnnnnnnnnnnnnnnnnnnnnnnnnnnnnnnnnnnnnnnnnnnnnnnnnnnnnnnnnnnnnnnnnnnnnnnnnnnnnnnnnnnnnnnnnnnnnnnnnnnnnnnnnnnnnnnnnnnnnnnnnnnnnnnnnnnnnnnnnnnnnnnnnnnnnnnnnnnnnnnnnnnnnnnnnnnnnnnnnnnnnnnnnnnnnnnnnnnnnnnnnnnnnnnnnnnnnnnnnnnnnnnnnnnnnnnnnnnnnnnnnnnnnnnnnnnnnnnnnnnnnnnnnnnnnnnnnnnnnnnnnnnnnnnnnnnnnnnnnnnnnnnnnnnnnnnnnnnnnnnnnnnnnnnnnnnnnnnnnnnnnnnnnnnnnnnnnnnnnnnnnnnnnnnnnnnnnnnnnnnnnnnnnnnnnnnnnnnnnnnnnnnnnnnnnnnnnnnnnnnnnnnnnnnnnnnnnnnnnnnnnnnnnnnnnnnnnnnnnnnnnnnnnnnnnnnnnnnnnnnnnnnnnnnnnnnnnnnnnnnnnnnnnnnnnnnnnnnnnnnnnnnnnnnnnnnnnnnnnnnnnnnnnnnnnnnnnnnnnnnnnnnnnnnnnnnnnnnnnnnnnnnnnnnnnnnnnnnnnnnnnnnnnnnnnnnnnnnnnnnnnnnnnnnnnnnnnnnnnnnnnnnnnnnnnnnnnnnnnnnnnnnnnnnnnnnnnnnnnnnnnnnnnnnnnnnnnnnnnnnnnnnnnnnnnnnnnnnnnnnnnnnnnnnnnnnnnnnnnnnnnnnnnnnnnnnnnnnnnnnnnnnnnnnnnnnnnnnnnnnnnnnnnnnnnnnnnnnnnnnnnnnnnnnnnnnnnnnnnnnnnnnnnnnnnnnnnnnnnnnnnnnnnnnnnnnnnnnnnnnnnnnnnnnnnnnnnnnnnnnnnnnnnnnnnnnnnnnnnnnnnnnnnnnnnnnnnnnnnnnnnnnnnnnnnnnnnnnnnnnnnnnnnnnnnnnnnnnnnnnnnnnnnnnnnnnnnnnnnnnnnnnnnnnnnnnnnnnnnnnnnnnnnnnnnnnnnnnnnnnnnnnnnnnnnnnnnnnnnnnnnnnnnnnnnnnnnnnnnnnnnnnnnnnnnnnnnnnnnnnnnnnnnnnnnnnnnnnnnnnnnnnnnnnnnnnnnnnnnnnnnnnnnnnnnnnnnnnnnnnnnnnnnnnnnnnnnnnnnnnnnnnnnnnnnnnnnnnnnnnnnnnnnnnnnnnnnnnnnnnnnnnnnnnnnnnnnnnnnnnnnnnnnnnnnnnnnnnnnnnnnnnnnnnnnnnnnnnnnnnnnnnnnnnnnnnnnnnnnnnnnnnnnnnnnnnnnnnnnnnnnnnnnnnnnnnnnnnnnnnnnnnnnnnnnnnnnnnnnnnnnnnnnnnnnnnnnnnnnnnnnnnnnnnnnnnnnnnnnnnnnnnnnnnnnnnnnnnnnnnnnnnnnnnnnnnnnnnnnnnnnnnnnnnnnnnnnnnnnnnnnnnnnnnnnnnnnnnnnnnnnnnnnnnnnnnnnnnnnnnnnnnnnnnnnnnnnnnnnnnnnnnnnnnnnnnnnnnnnnnnnnnnnnnnnnnnnnnnnnnnnnnnnnnnnnnnnnnnnnnnnnnnnnnnnnnnnnnnnnnnnnnnnnnnnnnnnnnnnnnnnnnnnnnnnnnnnnnnnnnnnnnnnnnnnnnnnnnnnnnnnnnnnnnnnnnnnnnnnnnnnnnnnnnnnnnnnnnnnnnnnnnnnnnnnnnnnnnnnnnnnnnnnnnnnnnnnnnnnnnnnnnnnnnnnnnnnnnnnnnnnnnnnnnnnnnnnnnnnnnnnnnnnnnnnnnnnnnnnnnnnnnnnnnnnnnnnnnnnnnnnnnnnnnnnnnnnnnnnnnnnnnnnnnnnnnnnnnnnnnnnnnnnnnnnnnnnnnnnnnnnnnnnnnnnnnnnnnnnnnnnnnnnnnnnnnnnnnnnnnnnnnnnnnnnnnnnnnnnnnnnnnnnnnnnnnnnnnnnnnnnnnnnnnnnnnnnnnnnnnnnnnnnnnnnnnnnnnnnnnnnnnnnnnnnnnnnnnnnnnnnnnnnnnnnnnnnnnnnnnnnnnnnnnnnnnnnnnnnnnnnnnnnnnnnnnnnnnnnnnnnnnnnnnnnnnnnnnnnnnnnnnnnnnnnnnnnnnnnnnnnnnnnnnnnnnnnnnnnnnnnnnnnnnnnnnnnnnnnnnnnnnnnnnnnnnnnnnnnnnnnnnnnnnnnnnnnnnnnnnnnnnnnnnnnnnnnnnnnnnnnnnnnnnnnnnnnnnnnnnnnnnnnnnnnnnnnnnnnnnnnnnnnnnnnnnnnnnnnnnnnnnnnnnnnnnnnnnnnnnnnnnnnnnnnnnnnnnnnnnnnnnnnnnnnnnnnnnnnnnnnnnnnnnnnnnnnnnnnnnnnnnnnnnnnnnnnnnnnnnnnnnnnnnnnnnnnnnnnnnnnnnnnnnnnnnnnnnnnnnnnnnnnnnnnnnnnnnnnnnnnnnnnnnnnnnnnnnnnnnnnnnnnnnnnnnnnnnnnnnnnnnnnnnnnnnnnnnnnnnnnnnnnnnnnnnnnnnnnnnnnnnnnnnnnnnnnnnnnnnnnnnnnnnnnnnnnnnnnnnnnnnnnnnnnnnnnnnnnnnnnnnnnnnnnnnnnnnnnnnnnnnnnnnnnnnnnnnnnnnnnnnnnnnnnnnnnnnnnnnnnnnnnnnnnnnnnnnnnnnnnnnnnnnnnnnnnnnnnnnnnnnnnnnnnnnnnnnnnnnnnnnnnnnnnnnnnnnnnnnnnnnnnnnnnnnnnnnnnnnnnnnnnnnnnnnnnnnnnnnnnnnnnnnnnnnnnnnnnnnnnnnnnnnnnnnnnnnnnnnnnnnnnnnnnnnnnnnnnnnnnnnnnnnnnnnnnnnnnnnnnnnnnnnnnnnnnnnnnnnnnnnnnnnnnnnnnnnnnnnnnnnnnnnnnnnnnnnnnnnnnnnnnnnnnnnnnnnnnnnnnnnnnnnnnnnnnnnnnnnnnnnnnnnnnnnnnnnnnnnnnnnnnnnnnnnnnnnnnnnnnnnnnnnnnnnnnnnnnnnnnnnnnnnnnnnnnnnnnnnnnnnnnnnnnnnnnnnnnnnnnnnnnnnnnnnnnnnnnnnnnnnnnnnnnnnnnnnnnnnnnnnnnnnnnnnnnnnnnnnnnnnnnnnnnnnnnnnnnnnnnnnnnnnnnnnnnnnnnnnnnnnnnnnnnnnnnnnnnnnnnnnnnnnnnnnnnnnnnnnnnnnnnnnnnnnnnnnnnnnnnnnnnnnnnnnnnnnnnnnnnnnnnnnnnnnnnnnnnnnnnnnnnnnnnnnnnnnnnnnnnnnnnnnnnnnnnnnnnnnnnnnnnnnnnnnnnnnnnnnnnnnnnnnnnnnnnnnnnnnnnnnnnnnnnnnnnnnnnnnnnnnnnnnnnnnnnnnnnnnnnnnnnnnnnnnnnnnnnnnnnnnnnnnnnnnnnnnnnnnnnnnnnnnnnnnnnnnnnnnnnnnnnnnnnnnnnnnnnnnnnnnnnnnnnnnnnnnnnnnnnnnnnnnnnnnnnnnnnnnnnnnnnnnnnnnnnnnnnnnnnnnnnnnnnnnnnnnnnnnnnnnnnnnnnnnnnnnnnnnnnnnnnnnnnnnnnnnnnnnnnnnnnnnnnnnnnnnnnnnnnnnnnnnnnnnnnnnnnnnnnnnnnnnnnnnnnnnnnnnnnnnnnnnnnnnnnnnnnnnnnnnnnnnnnnnnnnnnnnnnnnnnnnnnnnnnnnnnnnnnnnnnnnnnnnnnnnnnnnnnnnnnnnnnnnnnnnnnnnnnnnnnnnnnnnnnnnnnnnnnnnnnnnnnnnnnnnnnnnnnnnnnnnnnnnnnnnnnnnnnnnnnnnnnnnnnnnnnnnnnnnnnnnnnnnnnnnnnnnnnnnnnnnnnnnnnnnnnnnnnnnnnnnnnnnnnnnnnnnnnnnnnnnnnnnnnnnnnnnnnnnnnnnnnnnnnnnnnnnnnnnnnnnnnnnnnnnnnnnnnnnnnnnnnnnnnnnnnnnnnnnnnnnnnnnnnnnnnnnnnnnnnnnnnnnnnnnnnnnnnnnnnnnnnnnnnnnnnnnnnnnnnnnnnnnnnnnnnnnnnnnnnnnnnnnnnnnnnnnnnnnnnnnnnnnnnnnnnnnnnnnnnnnnnnnnnnnnnnnnnnnnnnnnnnnnnnnnnnnnnnnnnnnnnnnnnnnnnnnnnnnnnnnnnnnnnnnnnnnnnnnnnnnnnnnnnnnnnnnnnnnnnnnnnnnnnnnnnnnnnnnnnnnnnnnnnnnnnnnnnnnnnnnnnnnnnnnnnnnnnnnnnnnnnnnnnnnnnnnnnnnnnnnnnnnnnnnnnnnnnnnnnnnnnnnnnnnnnnnnnnnnnnnnnnnnnnnnnnnnnnnnnnnnnnnnnnnnnnnnnnnnnnnnnnnnnnnnnnnnnnnnnnnnnnnnnnnnnnnnnnnnnnnnnnnnnnnnnnnnnnnnnnnnnnnnnnnnnnnnnnnnnnnnnnnnnnnnnnnnnnnnnnnnnnnnnnnnnnnnnnnnnnnnnnnnnnnnnnnnnnnnnnnnnnnnnnnnnnnnnnnnnnnnnnnnnnnnnnnnnnnnnnnnnnnnnnnnnnnnnnnnnnnnnnnnnnnnnnnnnnnnnnnnnnnnnnnnnnnnnnnnnnnnnnnnnnnnnnnnnnnnnnnnnnnnnnnnnnnnnnnnnnnnnnnnnnnnnnnnnnnnnnnnnnnnnnnnnnnnnnnnnnnnnnnnnnnnnnnnnnnnnnnnnnnnnnnnnnnnnnnnnnnnnnnnnnnnnnnnnnnnnnnnnnnnnnnnnnnnnnnnnnnnnnnnnnnnnnnnnnnnnnnnnnnnnnnnnnnnnnnnnnnnnnnnnnnnnnnnnnnnnnnnnnnnnnnnnnnnnnnnnnnnnnnnnnnnnnnnnnnnnnnnnnnnnnnnnnnnnnnnnnnnnnnnnnnnnnnnnnnnnnnnnnnnnnnnnnnnnnnnnnnnnnnnnnnnnnnnnnnnnnnnnnnnnnnnnnnnnnnnnnnnnnnnnnnnnnnnnnnnnnnnnnnnnnnnnnnnnnnnnnnnnnnnnnnnnnnnnnnnnnnnnnnnnnnnnnnnnnnnnnnnnnnnnnnnnnnnnnnnnnnnnnnnnnnnnnnnnnnnnnnnnnnnnnnnnnnnnnnnnnnnnnnnnnnnnnnnnnnnnnnnnnnnnnnnnnnnnnnnnnnnnnnnnnnnnnnnnnnnnnnnnnnnnnnnnnnnnnnnnnnnnnnnnnnnnnnnnnnnnnnnnnnnnnnnnnnnnnnnnnnnnnnnnnnnnnnnnnnnnnnnnnnnnnnnnnnnnnnnnnnnnnnnnnnnnnnnnnnnnnnnnnnnnnnnnnnnnnnnnnnnnnnnnnnnnnnnnnnnnnnnnnnnnnnnnnnnnnnnnnnnnnnnnnnnnnnnnnnnnnnnnnnnnnnnnnnnnnnnnnnnnnnnnnnnnnnnnnnnnnnnnnnnnnnnnnnnnnnnnnnnnnnnnnnnnnnnnnnnnnnnnnnnnnnnnnnnnnnnnnnnnnnnnnnnnnnnnnnnnnnnnnnnnnnnnnnnnnnnnnnnnnnnnnnnnnnnnnnnnnnnnnnnnnnnnnnnnnnnnnnnnnnnnnnnnnnnnnnnnnnnnnnnnnnnnnnnnnnnnnnnnnnnnnnnnnnnnnnnnnnnnnnnnnnnnnnnnnnnnnnnnnnnnnnnnnnnnnnnnnnnnnnnnnnnnnnnnnnnnnnnnnnnnnnnnnnnnnnnnnnnnnnnnnnnnnnnnnnnnnnnnnnnnnnnnnnnnnnnnnnnnnnnnnnnnnnnnnnnnnnnnnnnnnnnnnnnnnnnnnnnnnnnnnnnnnnnnnnnnnnnnnnnnnnnnnnnnnnnnnnnnnnnnnnnnnnnnnnnnnnnnnnnnnnnnnnnnnnnnnnnnnnnnnnnnnnnnnnnnnnnnnnnnnnnnnnnnnnnnnnnnnnnnnnnnnnnnnnnnnnnnnnnnnnnnnnnnnnnnnnnnnnnnnnnnnnnnnnnnnnnnnnnnnnnnnnnnnnnnnnnnnnnnnnnnnnnnnnnnnnnnnnnnnnnnnnnnnnnnnnnnnnnnnnnnnnnnnnnnnnnnnnnnnnnnnnnnnnnnnnnnnnnnnnnnnnnnnnnnnnnnnnnnnnnnnnnnnnnnnnnnnnnnnnnnnnnnnnnnnnnnnnnnnnnnnnnnnnnnnnnnnnnnnnnnnnnnnnnnnnnnnnnnnnnnnnnnnnnnnnnnnnnnnnnnnnnnnnnnnnnnnnnnnnnnnnnnnnnnnnnnnnnnnnnnnnnnnnnnnnnnnnnnnnnnnnnnnnnnnnnnnnnnnnnnnnnnnnnnnnnnnnnnnnnnnnnnnnnnnnnnnnnnnnnnnnnnnnnnnnnnnnnnnnnnnnnnnnnnnnnnnnnnnnnnnnnnnnnnnnnnnnnnnnnnnnnnnnnnnnnnnnnnnnnnnnnnnnnnnnnnnnnnnnnnnnnnnnnnnnnnnnnnnnnnnnnnnnnnnnnnnnnnnnnnnnnnnnnnnnnnnnnnnnnnnnnnnnnnnnnnnnnnnnnnnnnnnnnnnnnnnnnnnnnnnnnnnnnnnnnnnnnnnnnnnnnnnnnnnnnnnnnnnnnnnnnnnnnnnnnnnnnnnnnnnnnnnnnnnnnnnnnnnnnnnnnnnnnnnnnnnnnnnnnnnnnnnnnnnnnnnnnnnnnnnnnnnnnnnnnnnnnnnnnnnnnnnnnnnnnnnnnnnnnnnnnnnnnnnnnnnnnnnnnnnnnnnnnnnnnnnnnnnnnnnnnnnnnnnnnnnnnnnnnnnnnnnnnnnnnnnnnnnnnnnnnnnnnnnnnnnnnnnnnnnnnnnnnnnnnnnnnnnnnnnnnnnnnnnnnnnnnnnnnnnnnnnnnnnnnnnnnnnnnnnnnnnnnnnnnnnnnnnnnnnnnnnnnnnnnnnnnnnnnnnnnnnnnnnnnnnnnnnnnnnnnnnnnnnnnnnnnnnnnnnnnnnnnnnnnnnnnnnnnnnnnnnnnnnnnnnnnnnnnnnnnnnnnnnnnnnnnnnnnnnnnnnnnnnnnnnnnnnnnnnnnnnnnnnnnnnnnnnnnnnnnnnnnnnnnnnnnnnnnnnnnnnnnnnnnnnnnnnnnnnnnnnnnnnnnnnnnnnnnnnnnnnnnnnnnnnnnnnnnnnnnnnnnnnnnnnnnnnnnnnnnnnnnnnnnnnnnnnnnnnnnnnnnnnnnnnnnnnnnnnnnnnnnnnnnnnnnnnnnnnnnnnnnnnnnnnnnnnnnnnnnnnnnnnnnnnnnnnnnnnnnnnnnnnnnnnnnnnnnnnnnnnnnnnnnnnnnnnnnnnnnnnnnnnnnnnnnnnnnnnnnnnnnnnnnnnnnnnnnnnnnnnnnnnnnnnnnnnnnnnnnnnnnnnnnnnnnnnnnnnnnnnnnnnnnnnnnnnnnnnnnnnnnnnnnnnnnnnnnnnnnnnnnnnnnnnnnnnnnnnnnnnnnnnnnnnnnnnnnnnnnnnnnnnnnnnnnnnnnnnnnnnnnnnnnnnnnnnnnnnnnnnnnnnnnnnnnnnnnnnnnnnnnnnnnnnnnnnnnnnnnnnnnnnnnnnnnnnnnnnnnnnnnnnnnnnnnnnnnnnnnnnnnnnnnnnnnnnnnnnnnnnnnnnnnnnnnnnnnnnnnnnnnnnnnnnnnnnnnnnnnnnnnnnnnnnnnnnnnnnnnnnnnnnnnnnnnnnnnnnnnnnnnnnnnnnnnnnnnnnnnnnnnnnnnnnnnnnnnnnnnnnnnnnnnnnnnnnnnnnnnnnnnnnnnnnnnnnnnnnnnnnnnnnnnnnnnnnnnnnnnnnnnnnnnnnnnnnnnnnnnnnnnnnnnnnnnnnnnnnnnnnnnnnnnnnnnnnnnnnnnnnnnnnnnnnnnnnnnnnnnnnnnnnnnnnnnnnnnnnnnnnnnnnnnnnnnnnnnnnnnnnnnnnnnnnnnnnnnnnnnnnnnnnnnnnnnnnnnnnnnnnnnnnnnnnnnnnnnnnnnnnnnnnnnnnnnnnnnnnnnnnnnnnnnnnnnnnnnnnnnnnnnnnnnnnnnnnnnnnnnnnnnnnnnnnnnnnnnnnnnnnnnnnnnnnnnnnnnnnnnnnnnnnnnnnnnnnnnnnnnnnnnnnnnnnnnnnnnnnnnnnnnnnnnnnnnnnnnnnnnnnnnnnnnnnnnnnnnnnnnnnnnnnnnnnnnnnnnnnnnnnnnnnnnnnnnnnnnnnnnnnnnnnnnnnnnnnnnnnnnnnnnnnnnnnnnnnnnnnnnnnnnnnnnnnnnnnnnnnnnnnnnnnnnnnnnnnnnnnnnnnnnnnnnnnnnnnnnnnnnnnnnnnnnnnnnnnnnnnnnnnnnnnnnnnnnnnnnnnnnnnnnnnnnnnnnnnnnnnnnnnnnnnnnnnnnnnnnnnnnnnnnnnnnnnnnnnnnnnnnnnnnnnnnnnnnnnnnnnnnnnnnnnnnnnnnnnnnnnnnnnnnnnnnnnnnnnnnnnnnnnnnnnnnnnnnnnnnnnnnnnnnnnnnnnnnnnnnnnnnnnnnnnnnnnnnnnnnnnnnnnnnnnnnnnnnnnnnnnnnnnnnnnnnnnnnnnnnnnnnnnnnnnnnnnnnnnnnnnnnnnnnnnnnnnnnnnnnnnnnnnnnnnnnnnnnnnnnnnnnnnnnnnnnnnnnnnnnnnnnnnnnnnnnnnnnnnnnnnnnnnnnnnnnnnnnnnnnnnnnnnnnnnnnnnnnnnnnnnnnnnnnnnnnnnnnnnnnnnnnnnnnnnnnnnnnnnnnnnnnnnnnnnnnnnnnnnnnnnnnnnnnnnnnnnnnnnnnnnnnnnnnnnnnnnnnnnnnnnnnnnnnnnnnnnnnnnnnnnnnnnnnnnnnnnnnnnnnnnnnnnnnnnnnnnnnnnnnnnnnnnnnnnnnnnnnnnnnnnnnnnnnnnnnnnnnnnnnnnnnnnnnnnnnnnnnnnnnnnnnnnnnnnnnnnnnnnnnnnnnnnnnnnnnnnnnnnnnnnnnnnnnnnnnnnnnnnnnnnnnnnnnnnnnnnnnnnnnnnnnnnnnnnnnnnnnnnnnnnnnnnnnnnnnnnnnnnnnnnnnnnnnnnnnnnnnnnnnnnnnnnnnnnnnnnnnnnnnnnnnnnnnnnnnnnnnnnnnnnnnnnnnnnnnnnnnnnnnnnnnnnnnnnnnnnnnnnnnnnnnnnnnnnnnnnnnnnnnnnnnnnnnnnnnnnnnnnnnnnnnnnnnnnnnnnnnnnnnnnnnnnnnnnnnnnnnnnnnnnnnnnnnnnnnnnnnnnnnnnnnnnnnnnnnnnnnnnnnnnnnnnnnnnnnnnnnnnnnnnnnnnnnnnnnnnnnnnnnnnnnnnnnnnnnnnnnnnnnnnnnnnnnnnnnnnnnnnnnnnnnnnnnnnnnnnnnnnnnnnnnnnnnnnnnnnnnnnnnnnnnnnnnnnnnnnnnnnnnnnnnnnnnnnnnnnnnnnnnnnnnnnnnnnnnnnnnnnnnnnnnnnnnnnnnnnnnnnnnnnnnnnnnnnnnnnnnnnnnnnnnnnnnnnnnnnnnnnnnnnnnnnnnnnnnnnnnnnnnnnnnnnnnnnnnnnnnnnnnnnnnnnnnnnnnnnnnnnnnnnnnnnnnnnnnnnnnnnnnnnnnnnnnnnnnnnnnnnnnnnnnnnnnnnnnnnnnnnnnnnnnnnnnnnnnnnnnnnnnnnnnnnnnnnnnnnnnnnnnnnnnnnnnnnnnnnnnnnnnnnnnnnnnnnnnnnnnnnnnnnnnnnnnnnnnnnnnnnnnnnnnnnnnnnnnnnnnnnnnnnnnnnnnnnnnnnnnnnnnnnnnnnnnnnnnnnnnnnnnnnnnnnnnnnnnnnnnnnnnnnnnnnnnnnnnnnnnnnnnnnnnnnnnnnnnnnnnnnnnnnnnnnnnnnnnnnnnnnnnnnnnnnnnnnnnnnnnnnnnnnnnnnnnnnnnnnnnnnnnnnnnnnnnnnnnnnnnnnnnnnnnnnnnnnnnnnnnnnnnnnnnnnnnnnnnnnnnnnnnnnnnnnnnnnnnnnnnnnnnnnnnnnnnnnnnnnnnnnnnnnnnnnnnnnnnnnnnnnnnnnnnnnnnnnnnnnnnnnnnnnnnnnnnnnnnnnnnnnnnnnnnnnnnnnnnnnnnnnnnnnnnnnnnnnnnnnnnnnnnnnnnnnnnnnnnnnnnnnnnnnnnnnnnnnnnnnnnnnnnnnnnnnnnnnnnnnnnnnnnnnnnnnnnnnnnnnnnnnnnnnnnnnnnnnnnnnnnnnnnnnnnnnnnnnnnnnnnnnnnnnnnnnnnnnnnnnnnnnnnnnnnnnnnnnnnnnnnnnnnnnnnnnnnnnnnnnnnnnnnnnnnnnnnnnnnnnnnnnnnnnnnnnnnnnnnnnnnnnnnnnnnnnnnnnnnnnnnnnnnnnnnnnnnnnnnnnnnnnnnnnnnnnnnnnnnnnnnnnnnnnnnnnnnnnnnnnnnnnnnnnnnnnnnnnnnnnnnnnnnnnnnnnnnnnnnnnnnnnnnnnnnnnnnnnnnnnnnnnnnnnnnnnnnnnnnnnnnnnnnnnnnnnnnnnnnnnnnnnnnnnnnnnnnnnnnnnnnnnnnnnnnnnnnnnnnnnnnnnnnnnnnnnnnnnnnnnnnnnnnnnnnnnnnnnnnnnnnnnnnnnnnnnnnnnnnnnnnnnnnnnnnnnnnnnnnnnnnnnnnnnnnnnnnnnnnnnnnnnnnnnnnnnnnnnnnnnnnnnnnnnnnnnnnnnnnnnnnnnnnnnnnnnnnnnnnnnnnnnnnnnnnnnnnnnnnnnnnnnnnnnnnnnnnnnnnnnnnnnnnnnnnnnnnnnnnnnnnnnnnnnnnnnnnnnnnnnnnnnnnnnnnnnnnnnnnnnnnnnnnnnnnnnnnnnnnnnnnnnnnnnnnnnnnnnnnnnnnnnnnnnnnnnnnnnnnnnnnnnnnnnnnnnnnnnnnnnnnnnnnnnnnnnnnnnnnnnnnnnnnnnnnnnnnnnnnnnnnnnnnnnnnnnnnnnnnnnnnnnnnnnnnnnnnnnnnnnnnnnnnnnnnnnnnnnnnnnnnnnnnnnnnnnnnnnnnnnnnnnnnnnnnnnnnnnnnnnnnnnnnnnnnnnnnnnnnnnnnnnnnnnnnnnnnnnnnnnnnnnnnnnnnnnnnnnnnnnnnnnnnnnnnnnnnnnnnnnnnnnnnnnnnnnnnnnnnnnnnnnnnnnnnnnnnnnnnnnnnnnnnnnnnnnnnnnnnnnnnnnnnnnnnnnnnnnnnnnnnnnnnnnnnnnnnnnnnnnnnnnnnnnnnnnnnnnnnnnnnnnnnnnnnnnnnnnnnnnnnnnnnnnnnnnnnnnnnnnnnnnnnnnnnnnnnnnnnnnnnnnnnnnnnnnnnnnnnnnnnnnnnnnnnnnnnnnnnnnnnnnnnnnnnnnnnnnnnnnnnnnnnnnnnnnnnnnnnnnnnnnnnnnnnnnnnnnnnnnnnnnnnnnnnnnnnnnnnnnnnnnnnnnnnnnnnnnnnnnnnnnnnnnnnnnnnnnnnnnnnnnnnnnnnnnnnnnnnnnnnnnnnnnnnnnnnnnnnnnnnnnnnnnnnnnnnnnnnnnnnnnnnnnnnnnnnnnnnnnnnnnnnnnnnnnnnnnnnnnnnnnnnnnnnnnnnnnnnnnnnnnnnnnnnnnnnnnnnnnnnnnnnnnnnnnnnnnnnnnnnnnnnnnnnnnnnnnnnnnnnnnnnnnnnnnnnnnnnnnnnnnnnnnnnnnnnnnnnnnnnnnnnnnnnnnnnnnnnnnnnnnnnnnnnnnnnnnnnnnnnnnnnnnnnnnnnnnnnnnnnnnnnnnnnnnnnnnnnnnnnnnnnnnnnnnnnnnnnnnnnnnnnnnnnnnnnnnnnnnnnnnnnnnnnnnnnnnnnnnnnnnnnnnnnnnnnnnnnnnnnnnnnnnnnnnnnnnnnnnnnnnnnnnnnnnnnnnnnnnnnnnnnnnnnnnnnnnnnnnnnnnnnnnnnnnnnnnnnnnnnnnnnnnnnnnnnnnnnnnnnnnnnnnnnnnnnnnnnnnnnnnnnnnnnnnnnnnnnnnnnnnnnnnnnnnnnnnnnnnnnnnnnnnnnnnnnnnnnnnnnnnnnnnnnnnnnnnnnnnnnnnnnnnnnnnnnnnnnnnnnnnnnnnnnnnnnnnnnnnnnnnnnnnnnnnnnnnnnnnnnnnnnnnnnnnnnnnnnnnnnnnnnnnnnnnnnnnnnnnnnnnnnnnnnnnnnnnnnnnnnnnnnnnnnnnnnnnnnnnnnnnnnnnnnnnnnnnnnnnnnnnnnnnnnnnnnnnnnnnnnnnnnnnnnnnnnnnnnnnnnnnnnnnnnnnnnnnnnnnnnnnnnnnnnnnnnnnnnnnnnnnnnnnnnnnnnnnnnnnnnnnnnnnnnnnnnnnnnnnnnnnnnnnnnnnnnnnnnnnnnnnnnnnnnnnnnnnnnnnnnnnnnnnnnnnnnnnnnnnnnnnnnnnnnnnnnnnnnnnnnnnnnnnnnnnnnnnnnnnnnnnnnnnnnnnnnnnnnnnnnnnnnnnnnnnnnnnnnnnnnnnnnnnnnnnnnnnnnnnnnnnnnnnnnnnnnnnnnnnnnnnnnnnnnnnnnnnnnnnnnnnnnnnnnnnnnnnnnnnnnnnnnnnnnnnnnnnnnnnnnnnnnnnnnnnnnnnnnnnnnnnnnnnnnnnnnnnnnnnnnnnnnnnnnnnnnnnnnnnnnnnnnnnnnnnnnnnnnnnnnnnnnnnnnnnnnnnnnnnnnnnnnnnnnnnnnnnnnnnnnnnnnnnnnnnnnnnnnnnnnnnnnnnnnnnnnnnnnnnnnnnnnnnnnnnnnnnnnnnnnnnnnnnnnnnnnnnnnnnnnnnnnnnnnnnnnnnnnnnnnnnnnnnnnnnnnnnnnnnnnnnnnnnnnnnnnnnnnnnnnnnnnnnnnnnnnnnnnnnnnnnnnnnnnnnnnnnnnnnnnnnnnnnnnnnnnnnnnnnnnnnnnnnnnnnnnnnnnnnnnnnnnnnnnnnnnnnnnnnnnnnnnnnnnnnnnnnnnnnnnnnnnnnnnnnnnnnnnnnnnnnnnnnnnnnnnnnnnnnnnnnnnnnnnnnnnnnnnnnnnnnnnnnnnnnnnnnnnnnnnnnnnnnnnnnnnnnnnnnnnnnnnnnnnnnnnnnnnnnnnnnnnnnnnnnnnnnnnnnnnnnnnnnnnnnnnnnnnnnnnnnnnnnnnnnnnnnnnnnnnnnnnnnnnnnnnnnnnnnnnnnnnnnnnnnnnnnnnnnnnnnnnnnnnnnnnnnnnnnnnnnnnnnnnnnnnnnnnnnnnnnnnnnnnnnnnnnnnnnnnnnnnnnnnnnnnnnnnnnnnnnnnnnnnnnnnnnnnnnnnnnnnnnnnnnnnnnnnnnnnnnnnnnnnnnnnnnnnnnnnnnnnnnnnnnnnnnnnnnnnnnnnnnnnnnnnnnnnnnnnnnnnnnnnnnnnnnnnnnnnnnnnnnnnnnnnnnnnnnnnnnnnnnnnnnnnnnnnnnnnnnnnnnnnnnnnnnnnnnnnnnnnnnnnnnnnnnnnnnnnnnnnnnnnnnnnnnnnnnnnnnnnnnnnnnnnnnnnnnnnnnnnnnnnnnnnnnnnnnnnnnnnnnnnnnnnnnnnnnnnnnnnnnnnnnnnnnnnnnnnnnnnnnnnnnnnnnnnnnnnnnnnnnnnnnnnnnnnnnnnnnnnnnnnnnnnnnnnnnnnnnnnnnnnnnnnnnnnnnnnnnnnnnnnnnnnnnnnnnnnnnnnnnnnnnnnnnnnnnnnnnnnnnnnnnnnnnnnnnnnnnnnnnnnnnnnnnnnnnnnnnnnnnnnnnnnnnnnnnnnnnnnnnnnnnnnnnnnnnnnnnnnnnnnnnnnnnnnnnnnnnnnnnnnnnnnnnnnnnnnnnnnnnnnnnnnnnnnnnnnnnnnnnnnnnnnnnnnnnnnnnnnnnnnnnnnnnnnnnnnnnnnnnnnnnnnnnnnnnnnnnnnnnnnnnnnnnnnnnnnnnnnnnnnnnnnnnnnnnnnnnnnnnnnnnnnnnnnnnnnnnnnnnnnnnnnnnnnnnnnnnnnnnnnnnnnnnnnnnnnnnnnnnnnnnnnnnnnnnnnnnnnnnnnnnnnnnnnnnnnnnnnnnnnnnnnnnnnnnnnnnnnnnnnnnnnnnnnnnnnnnnnnnnnnnnnnnnnnnnnnnnnnnnnnnnnnnnnnnnnnnnnnnnnnnnnnnnnnnnnnnnnnnnnnnnnnnnnnnnnnnnnnnnnnnnnnnnnnnnnnnnnnnnnnnnnnnnnnnnnnnnnnnnnnnnnnnnnnnnnnnnnnnnnnnnnnnnnnnnnnnnnnnnnnnnnnnnnnnnnnnnnnnnnnnnnnnnnnnnnnnnnnnnnnnnnnnnnnnnnnnnnnnnnnnnnnnnnnnnnnnnnnnnnnnnnnnnnnnnnnnnnnnnnnnnnnnnnnnnnnnnnnnnnnnnnnnnnnnnnnnnnnnnnnnnnnnnnnnnnnnnnnnnnnnnnnnnnnnnnnnnnnnnnnnnnnnnnnnnnnnnnnnnnnnnnnnnnnnnnnnnnnnnnnnnnnnnnnnnnnnnnnnnnnnnnnnnnnnnnnnnnnnnnnnnnnnnnnnnnnnnnnnnnnnnnnnnnnnnnnnnnnnnnnnnnnnnnnnnnnnnnnnnnnnnnnnnnnnnnnnnnnnnnnnnnnnnnnnnnnnnnnnnnnnnnnnnnnnnnnnnnnnnnnnnnnnnnnnnnnnnnnnnnnnnnnnnnnnnnnnnnnnnnnnnnnnnnnnnnnnnnnnnnnnnnnnnnnnnnnnnnnnnnnnnnnnnnnnnnnnnnnnnnnnnnnnnnnnnnnnnnnnnnnnnnnnnnnnnnnnnnnnnnnnnnnnnnnnnnnnnnnnnnnnnnnnnnnnnnnnnnnnnnnnnnnnnnnnnnnnnnnnnnnnnnnnnnnnnnnnnnnnnnnnnnnnnnnnnnnnnnnnnnnnnnnnnnnnnnnnnnnnnnnnnnnnnnnnnnnnnnnnnnnnnnnnnnnnnnnnnnnnnnnnnnnnnnnnnnnnnnnnnnnnnnnnnnnnnnnnnnnnnnnnnnnnnnnnnnnnnnnnnnnnnnnnnnnnnnnnnnnnnnnnnnnnnnnnnnnnnnnnnnnnnnnnnnnnnnnnnnnnnnnnnnnnnnnnnnnnnnnnnnnnnnnnnnnnnnnnnnnnnnnnnnnnnnnnnnnnnnnnnnnnnnnnnnnnnnnnnnnnnnnnnnnnnnnnnnnnnnnnnnnnnnnnnnnnnnnnnnnnnnnnnnnnnnnnnnnnnnnnnnnnnnnnnnnnnnnnnnnnnnnnnnnnnnnnnnnnnnnnnnnnnnnnnnnnnnnnnnnnnnnnnnnnnnnnnnnnnnnnnnnnnnnnnnnnnnnnnnnnnnnnnnnnnnnnnnnnnnnnnnnnnnnnnnnnnnnnnnnnnnnnnnnnnnnnnnnnnnnnnnnnnnnnnnnnnnnnnnnnnnnnnnnnnnnnnnnnnnnnnnnnnnnnnnnnnnnnnnnnnnnnnnnnnnnnnnnnnnnnnnnnnnnnnnnnnnnnnnnnnnnnnnnnnnnnnnnnnnnnnnnnnnnnnnnnnnnnnnnnnnnnnnnnnnnnnnnnnnnnnnnnnnnnnnnnnnnnnnnnnnnnnnnnnnnnnnnnnnnnnnnnnnnnnnnnnnnnnnnnnnnnnnnnnnnnnnnnnnnnnnnnnnnnnnnnnnnnnnnnnnnnnnnnnnnnnnnnnnnnnnnnnnnnnnnnnnnnnnnnnnnnnnnnnnnnnnnnnnnnnnnnnnnnnnnnnnnnnnnnnnnnnnnnnnnnnnnnnnnnnnnnnnnnnnnnnnnnnnnnnnnnnnnnnnnnnnnnnnnnnnnnnnnnnnnnnnnnnnnnnnnnnnnnnnnnnnnnnnnnnnnnnnnnnnnnnnnnnnnnnnnnnnnnnnnnnnnnnnnnnnnnnnnnnnnnnnnnnnnnnnnnnnnnnnnnnnnnnnnnnnnnnnnnnnnnnnnnnnnnnnnnnnnnnnnnnnnnnnnnnnnnnnnnnnnnnnnnnnnnnnnnnnnnnnnnnnnnnnnnnnnnnnnnnnnnnnnnnnnnnnnnnnnnnnnnnnnnnnnnnnnnnnnnnnnnnnnnnnnnnnnnnnnnnnnnnnnnnnnnnnnnnnnnnnnnnnnnnnnnnnnnnnnnnnnnnnnnnnnnnnnnnnnnnnnnnnnnnnnnnnnnnnnnnnnnnnnnnnnnnnnnnnnnnnnnnnnnnnnnnnnnnnnnnnnnnnnnnnnnnnnnnnnnnnnnnnnnnnnnnnnnnnnnnnnnnnnnnnnnnnnnnnnnnnnnnnnnnnnnnnnnnnnnnnnnnnnnnnnnnnnnnnnnnnnnnnnnnnnnnnnnnnnnnnnnnnnnnnnnnnnnnnnnnnnnnnnnnnnnnnnnnnnnnnnnnnnnnnnnnnnnnnnnnnnnnnnnnnnnnnnnnnnnnnnnnnnnnnnnnnnnnnnnnnnnnnnnnnnnnnnnnnnnnnnnnnnnnnnnnnnnnnnnnnnnnnnnnnnnnnnnnnnnnnnnnnnnnnnnnnnnnnnnnnnnnnnnnnnnnnnnnnnnnnnnnnnnnnnnnnnnnnnnnnnnnnnnnnnnnnnnnnnnnnnnnnnnnnnnnnnnnnnnnnnnnnnnnnnnnnnnnnnnnnnnnnnnnnnnnnnnnnnnnnnnnnnnnnnnnnnnnnnnnnnnnnnnnnnnnnnnnnnnnnnnnnnnnnnnnnnnnnnnnnnnnnnnnnnnnnnnnnnnnnnnnnnnnnnnnnnnnnnnnnnnnnnnnnnnnnnnnnnnnnnnnnnnnnnnnnnnnnnnnnnnnnnnnnnnnnnnnnnnnnnnnnnnnnnnnnnnnnnnnnnnnnnnnnnnnnnnnnnnnnnnnnnnnnnnnnnnnnnnnnnnnnnnnnnnnnnnnnnnnnnnnnnnnnnnnnnnnnnnnnnnnnnnnnnnnnnnnnnnnnnnnnnnnnnnnnnnnnnnnnnnnnnnnnnnnnnnnnnnnnnnnnnnnnnnnnnnnnnnnnnnnnnnnnnnnnnnnnnnnnnnnnnnnnnnnnnnnnnnnnnnnnnnnnnnnnnnnnnnnnnnnnnnnnnnnnnnnnnnnnnnnnnnnnnnnnnnnnnnnnnnnnnnnnnnnnnnnnnnnnnnnnnnnnnnnnnnnnnnnnnnnnnnnnnnnnnnnnnnnnnnnnnnnnnnnnnnnnnnnnnnnnnnnnnnnnnnnnnnnnnnnnnnnnnnnnnnnnnnnnnnnnnnnnnnnnnnnnnnnnnnnnnnnnnnnnnnnnnnnnnnnnnnnnnnnnnnnnnnnnnnnnnnnnnnnnnnnnnnnnnnnnnnnnnnnnnnnnnnnnnnnnnnnnnnnnnnnnnnnnnnnnnnnnnnnnnnnnnnnnnnnnnnnnnnnnnnnnnnnnnnnnnnnnnnnnnnnnnnnnnnnnnnnnnnnnnnnnnnnnnnnnnnnnnnnnnnnnnnnnnnnnnnnnnnnnnnnnnnnnnnnnnnnnnnnnnnnnnnnnnnnnnnnnnnnnnnnnnnnnnnnnnnnnnnnnnnnnnnnnnnnnnnnnnnnnnnnnnnnnnnnnnnnnnnnnnnnnnnnnnnnnnnnnnnnnnnnnnnnnnnnnnnnnnnnnnnnnnnnnnnnnnnnnnnnnnnnnnnnnnnnnnnnnnnnnnnnnnnnnnnnnnnnnnnnnnnnnnnnnnnnnnnnnnnnnnnnnnnnnnnnnnnnnnnnnnnnnnnnnnnnnnnnnnnnnnnnnnnnnnnnnnnnnnnnnnnnnnnnnnnnnnnnnnnnnnnnnnnnnnnnnnnnnnnnnnnnnnnnnnnnnnnnnnnnnnnnnnnnnnnnnnnnnnnnnnnnnnnnnnnnnnnnnnnnnnnnnnnnnnnnnnnnnnnnnnnnnnnnnnnnnnnnnnnnnnnnnnnnnnnnnnnnnnnnnnnnnnnnnnnnnnnnnnnnnnnnnnnnnnnnnnnnnnnnnnnnnnnnnnnnnnnnnnnnnnnnnnnnnnnnnnnnnnnnnnnnnnnnnnnnnnnnnnnnnnnnnnnnnnnnnnnnnnnnnnnnnnnnnnnnnnnnnnnnnnnnnnnnnnnnnnnnnnnnnnnnnnnnnnnnnnnnnnnnnnnnnnnnnnnnnnnnnnnnnnnnnnnnnnnnnnnnnnnnnnnnnnnnnnnnnnnnnnnnnnnnnnnnnnnnnnnnnnnnnnnnnnnnnnnnnnnnnnnnnnnnnnnnnnnnnnnnnnnnnnnnnnnnnnnnnnnnnnnnnnnnnnnnnnnnnnnnnnnnnnnnnnnnnnnnnnnnnnnnnnnnnnnnnnnnnnnnnnnnnnnnnnnnnnnnnnnnnnnnnnnnnnnnnnnnnnnnnnnnnnnnnnnnnnnnnnnnnnnnnnnnnnnnnnnnnnnnnnnnnnnnnnnnnnnnnnnnnnnnnnnnnnnnnnnnnnnnnnnnnnnnnnnnnnnnnnnnnnnnnnnnnnnnnnnnnnnnnnnnnnnnnnnnnnnnnnnnnnnnnnnnnnnnnnnnnnnnnnnnnnnnnnnnnnnnnnnnnnnnnnnnnnnnnnnnnnnnnnnnnnnnnnnnnnnnnnnnnnnnnnnnnnnnnnnnnnnnnnnnnnnnnnnnnnnnnnnnnnnnnnnnnnnnnnnnnnnnnnnnnnnnnnnnnnnnnnnnnnnnnnnnnnnnnnnnnnnnnnnnnnnnnnnnnnnnnnnnnnnnnnnnnnnnnnnnnnnnnnnnnnnnnnnnnnnnnnnnnnnnnnnnnnnnnnnnnnnnnnnnnnnnnnnnnnnnnnnnnnnnnnnnnnnnnnnnnnnnnnnnnnnnnnnnnnnnnnnnnnnnnnnnnnnnnnnnnnnnnnnnnnnnnnnnnnnnnnnnnnnnnnnnnnnnnnnnnnnnnnnnnnnnnnnnnnnnnnnnnnnnnnnnnnnnnnnnnnnnnnnnnnnnnnnnnnnnnnnnnnnnnnnnnnnnnnnnnnnnnnnnnnnnnnnnnnnnnnnnnnnnnnnnnnnnnnnnnnnnnnnnnnnnnnnnnnnnnnnnnnnnnnnnnnnnnnnnnnnnnnnnnnnnnnnnnnnnnnnnnnnnnnnnnnnnnnnnnnnnnnnnnnnnnnnnnnnnnnnnnnnnnnnnnnnnnnnnnnnnnnnnnnnnnnnnnnnnnnnnnnnnnnnnnnnnnnnnnnnnnnnnnnnnnnnnnnnnnnnnnnnnnnnnnnnnnnnnnnnnnnnnnnnnnnnnnnnnnnnnnnnnnnnnnnnnnnnnnnnnnnnnnnnnnnnnnnnnnnnnnnnnnnnnnnnnnnnnnnnnnnnnnnnnnnnnnnnnnnnnnnnnnnnnnnnnnnnnnnnnnnnnnnnnnnnnnnnnnnnnnnnnnnnnnnnnnnnnnnnnnnnnnnnnnnnnnnnnnnnnnnnnnnnnnnnnnnnnnnnnnnnnnnnnnnnnnnnnnnnnnnnnnnnnnnnnnnnnnnnnnnnnnnnnnnnnnnnnnnnnnnnnnnnnnnnnnnnnnnnnnnnnnnnnnnnnnnnnnnnnnnnnnnnnnnnnnnnnnnnnnnnnnnnnnnnnnnnnnnnnnnnnnnnnnnnnnnnnnnnnnnnnnnnnnnnnnnnnnnnnnnnnnnnnnnnnnnnnnnnnnnnnnnnnnnnnnnnnnnnnnnnnnnnnnnnnnnnnnnnnnnnnnnnnnnnnnnnnnnnnnnnnnnnnnnnnnnnnnnnnnnnnnnnnnnnnnnnnnnnnnnnnnnnnnnnnnnnnnnnnnnnnnnnnnnnnnnnnnnnnnnnnnnnnnnnnnnnnnnnnnnnnnnnnnnnnnnnnnnnnnnnnnnnnnnnnnnnnnnnnnnnnnnnnnnnnnnnnnnnnnnnnnnnnnnnnnnnnnnnnnnnnnnnnnnnnnnnnnnnnnnnnnnnnnnnnnnnnnnnnnnnnnnnnnnnnnnnnnnnnnnnnnnnnnnnnnnnnnnnnnnnnnnnnnnnnnnnnnnnnnnnnnnnnnnnnnnnnnnnnnnnnnnnnnnnnnnnnnnnnnnnnnnnnnnnnnnnnnnnnnnnnnnnnnnnnnnnnnnnnnnnnnnnnnnnnnnnnnnnnnnnnnnnnnnnnnnnnnnnnnnnnnnnnnnnnnnnnnnnnnnnnnnnnnnnnnnnnnnnnnnnnnnnnnnnnnnnnnnnnnnnnnnnnnnnnnnnnnnnnnnnnnnnnnnnnnnnnnnnnnnnnnnnnnnnnnnnnnnnnnnnnnnnnnnnnnnnnnnnnnnnnnnnnnnnnnnnnnnnnnnnnnnnnnnnnnnnnnnnnnnnnnnnnnnnnnnnnnnnnnnnnnnnnnnnnnnnnnnnnnnnnnnnnnnnnnnnnnnnnnnnnnnnnnnnnnnnnnnnnnnnnnnnnnnnnnnnnnnnnnnnnnnnnnnnnnnnnnnnnnnnnnnnnnnnnnnnnnnnnnnnnnnnnnnnnnnnnnnnnnnnnnnnnnnnnnnnnnnnnnnnnnnnnnnnnnnnnnnnnnnnnnnnnnnnnnnnnnnnnnnnnnnnnnnnnnnnnnnnnnnnnnnnnnnnnnnnnnnnnnnnnnnnnnnnnnnnnnnnnnnnnnnnnnnnnnnnnnnnnnnnnnnnnnnnnnnnnnnnnnnnnnnnnnnnnnnnnnnnnnnnnnnnnnnnnnnnnnnnnnnnnnnnnnnnnnnnnnnnnnnnnnnnnnnnnnnnnnnnnnnnnnnnnnnnnnnnnnnnnnnnnnnnnnnnnnnnnnnnnnnnnnnnnnnnnnnnnnnnnnnnnnnnnnnnnnnnnnnnnnnnnnnnnnnnnnnnnnnnnnnnnnnnnnnnnnnnnnnnnnnnnnnnnnnnnnnnnnnnnnnnnnnnnnnnnnnnnnnnnnnnnnnnnnnnnnnnnnnnnnnnnnnnnnnnnnnnnnnnnnnnnnnnnnnnnnnnnnnnnnnnnnnnnnnnnnnnnnnnnnnnnnnnnnnnnnnnnnnnnnnnnnnnnnnnnnnnnnnnnnnnnnnnnnnnnnnnnnnnnnnnnnnnnnnnnnnnnnnnnnnnnnnnnnnnnnnnnnnnnnnnnnnnnnnnnnnnnnnnnnnnnnnnnnnnnnnnnnnnnnnnnnnnnnnnnnnnnnnnnnnnnnnnnnnnnnnnnnnnnnnnnnnnnnnnnnnnnnnnnnnnnnnnnnnnnnnnnnnnnnnnnnnnnnnnnnnnnnnnnnnnnnnnnnnnnnnnnnnnnnnnnnnnnnnnnnnnnnnnnnnnnnnnnnnnnnnnnnnnnnnnnnnnnnnnnnnnnnnnnnnnnnnnnnnnnnnnnnnnnnnnnnnnnnnnnnnnnnnnnnnnnnnnnnnnnnnnnnnnnnnnnnnnnnnnnnnnnnnnnnnnnnnnnnnnnnnnnnnnnnnnnnnnnnnnnnnnnnnnnnnnnnnnnnnnnnnnnnnnnnnnnnnnnnnnnnnnnnnnnnnnnnnnnnnnnnnnnnnnnnnnnnnnnnnnnnnnnnnnnnnnnnnnnnnnnnnnnnnnnnnnnnnnnnnnnnnnnnnnnnnnnnnnnnnnnnnnnnnnnnnnnnnnnnnnnnnnnnnnnnnnnnnnnnnnnnnnnnnnnnnnnnnnnnnnnnnnnnnnnnnnnnnnnnnnnnnnnnnnnnnnnnnnnnnnnnnnnnnnnnnnnnnnnnnnnnnnnnnnnnnnnnnnnnnnnnnnnnnnnnnnnnnnnnnnnnnnnnnnnnnnnnnnnnnnnnnnnnnnnnnnnnnnnnnnnnnnnnnnnnnnnnnnnnnnnnnnnnnnnnnnnnnnnnnnnnnnnnnnnnnnnnnnnnnnnnnnnnnnnnnnnnnnnnnnnnnnnnnnnnnnnnnnnnnnnnnnnnnnnnnnnnnnnnnnnnnnnnnnnnnnnnnnnnnnnnnnnnnnnnnnnnnnnnnnnnnnnnnnnnnnnnnnnnnnnnnnnnnnnnnnnnnnnnnnnnnnnnnnnnnnnnnnnnnnnnnnnnnnnnnnnnnnnnnnnnnnnnnnnnnnnnnnnnnnnnnnnnnnnnnnnnnnnnnnnnnnnnnnnnnnnnnnnnnnnnnnnnnnnnnnnnnnnnnnnnnnnnnnnnnnnnnnnnnnnnnnnnnnnnnnnnnnnnnnnnnnnnnnnnnnnnnnnnnnnnnnnnnnnnnnnnnnnnnnnnnnnnnnnnnnnnnnnnnnnnnnnnnnnnnnnnnnnnnnnnnnnnnnnnnnnnnnnnnnnnnnnnnnnnnnnnnnnnnnnnnnnnnnnnnnnnnnnnnnnnnnnnnnnnnnnnnnnnnnnnnnnnnnnnnnnnnnnnnnnnnnnnnnnnnnnnnnnnnnnnnnnnnnnnnnnnnnnnnnnnnnnnnnnnnnnnnnnnnnnnnnnnnnnnnnnnnnnnnnnnnnnnnnnnnnnnnnnnnnnnnnnnnnnnnnnnnnnnnnnnnnnnnnnnnnnnnnnnnnnnnnnnnnnnnnnnnnnnnnnnnnnnnnnnnnnnnnnnnnnnnnnnnnnnnnnnnnnnnnnnnnnnnnnnnnnnnnnnnnnnnnnnnnnnnnnnnnnnnnnnnnnnnnnnnnnnnnnnnnnnnnnnnnnnnnnnnnnnnnnnnnnnnnnnnnnnnnnnnnnnnnnnnnnnnnnnnnnnnnnnnnnnnnnnnnnnnnnnnnnnnnnnnnnnnnnnnnnnnnnnnnnnnnnnnnnnnnnnnnnnnnnnnnnnnnnnnnnnnnnnnnnnnnnnnnnnnnnnnnnnnnnnnnnnnnnnnnnnnnnnnnnnnnnnnnnnnnnnnnnnnnnnnnnnnnnnnnnnnnnnnnnnnnnnnnnnnnnnnnnnnnnnnnnnnnnnnnnnnnnnnnnnnnnnnnnnnnnnnnnnnnnnnnnnnnnnnnnnnnnnnnnnnnnnnnnnnnnnnnnnnnnnnnnnnnnnnnnnnnnnnnnnnnnnnnnnnnnnnnnnnnnnnnnnnnnnnnnnnnnnnnnnnnnnnnnnnnnnnnnnnnnnnnnnnnnnnnnnnnnnnnnnnnnnnnnnnnnnnnnnnnnnnnnnnnnnnnnnnnnnnnnnnnnnnnnnnnnnnnnnnnnnnnnnnnnnnnnnnnnnnnnnnnnnnnnnnnnnnnnnnnnnnnnnnnnnnnnnnnnnnnnnnnnnnnnnnnnnnnnnnnnnnnnnnnnnnnnnnnnnnnnnnnnnnnnnnnnnnnnnnnnnnnnnnnnnnnnnnnnnnnnnnnnnnnnnnnnnnnnnnnnnnnnnnnnnnnnnnnnnnnnnnnnnnnnnnnnnnnnnnnnnnnnnnnnnnnnnnnnnnnnnnnnnnnnnnnnnnnnnnnnnnnnnnnnnnnnnnnnnnnnnnnnnnnnnnnnnnnnnnnnnnnnnnnnnnnnnnnnnnnnnnnnnnnnnnnnnnnnnnnnnnnnnnnnnnnnnnnnnnnnnnnnnnnnnnnnnnnnnnnnnnnnnnnnnnnnnnnnnnnnnnnnnnnnnnnnnnnnnnnnnnnnnnnnnnnnnnnnnnnnnnnnnnnnnnnnnnnnnnnnnnnnnnnnnnnnnnnnnnnnnnnnnnnnnnnnnnnnnnnnnnnnnnnnnnnnnnnnnnnnnnnnnnnnnnnnnnnnnnnnnnnnnnnnnnnnnnnnnnnnnnnnnnnnnnnnnnnnnnnnnnnnnnnnnnnnnnnnnnnnnnnnnnnnnnnnnnnnnnnnnnnnnnnnnnnnnnnnnnnnnnnnnnnnnnnnnnnnnnnnnnnnnnnnnnnnnnnnnnnnnnnnnnnnnnnnnnnnnnnnnnnnnnnnnnnnnnnnnnnnnnnnnnnnnnnnnnnnnnnnnnnnnnnnnnnnnnnnnnnnnnnnnnnnnnnnnnnnnnnnnnnnnnnnnnnnnnnnnnnnnnnnnnnnnnnnnnnnnnnnnnnnnnnnnnnnnnnnnnnnnnnnnnnnnnnnnnnnnnnnnnnnnnnnnnnnnnnnnnnnnnnnnnnnnnnnnnnnnnnnnnnnnnnnnnnnnnnnnnnnnnnnnnnnnnnnnnnnnnnnnnnnnnnnnnnnnnnnnnnnnnnnnnnnnnnnnnnnnnnnnnnnnnnnnnnnnnnnnnnnnnnnnnnnnnnnnnnnnnnnnnnnnnnnnnnnnnnnnnnnnnnnnnnnnnnnnnnnnnnnnnnnnnnnnnnnnnnnnnnnnnnnnnnnnnnnnnnnnnnnnnnnnnnnnnnnnnnnnnnnnnnnnnnnnnnnnnnnnnnnnnnnnnnnnnnnnnnnnnnnnnnnnnnnnnnnnnnnnnnnnnnnnnnnnnnnnnnnnnnnnnnnnnnnnnnnnnnnnnnnnnnnnnnnnnnnnnnnnnnnnnnnnnnnnnnnnnnnnnnnnnnnnnnnnnnnnnnnnnnnnnnnnnnnnnnnnnnnnnnnnnnnnnnnnnnnnnnnnnnnnnnnnnnnnnnnnnnnnnnnnnnnnnnnnnnnnnnnnnnnnnnnnnnnnnnnnnnnnnnnnnnnnnnnnnnnnnnnnnnnnnnnnnnnnnnnnnnnnnnnnnnnnnnnnnnnnnnnnnnnnnnnnnnnnnnnnnnnnnnnnnnnnnnnnnnnnnnnnnnnnnnnnnnnnnnnnnnnnnnnnnnnnnnnnnnnnnnnnnnnnnnnnnnnnnnnnnnnnnnnnnnnnnnnnnnnnnnnnnnnnnnnnnnnnnnnnnnnnnnnnnnnnnnnnnnnnnnnnnnnnnnnnnnnnnnnnnnnnnnnnnnnnnnnnnnnnnnnnnnnnnnnnnnnnnnnnnnnnnnnnnnnnnnnnnnnnnnnnnnnnnnnnnnnnnnnnnnnnnnnnnnnnnnnnnnnnnnnnnnnnnnnnnnnnnnnnnnnnnnnnnnnnnnnnnnnnnnnnnnnnnnnnnnnnnnnnnnnnnnnnnnnnnnnnnnnnnnnnnnnnnnnnnnnnnnnnnnnnnnnnnnnnnnnnnnnnnnnnnnnnnnnnnnnnnnnnnnnnnnnnnnnnnnnnnnnnnnnnnnnnnnnnnnnnnnnnnnnnnnnnnnnnnnnnnnnnnnnnnnnnnnnnnnnnnnnnnnnnnnnnnnnnnnnnnnnnnnnnnnnnnnnnnnnnnnnnnnnnnnnnnnnnnnnnnnnnnnnnnnnnnnnnnnnnnnnnnnnnnnnnnnnnnnnnnnnnnnnnnnnnnnnnnnnnnnnnnnnnnnnnnnnnnnnnnnnnnnnnnnnnnnnnnnnnnnnnnnnnnnnnnnnnnnnnnnnnnnnnnnnnnnnnnnnnnnnnnnnnnnnnnnnnnnnnnnnnnnnnnnnnnnnnnnnnnnnnnnnnnnnnnnnnnnnnnnnnnnnnnnnnnnnnnnnnnnnnnnnnnnnnnnnnnnnnnnnnnnnnnnnnnnnnnnnnnnnnnnnnnnnnnnnnnnnnnnnnnnnnnnnnnnnnnnnnnnnnnnnnnnnnnnnnnnnnnnnnnnnnnnnnnnnnnnnnnnnnnnnnnnnnnnnnnnnnnnnnnnnnnnnnnnnnnnnnnnnnnnnnnnnnnnnnnnnnnnnnnnnnnnnnnnnnnnnnnnnnnnnnnnnnnnnnnnnnnnnnnnnnnnnnnnnnnnnnnnnnnnnnnnnnnnnnnnnnnnnnnnnnnnnnnnnnnnnnnnnnnnnnnnnnnnnnnnnnnnnnnnnnnnnnnnnnnnnnnnnnnnnnnnnnnnnnnnnnnnnnnnnnnnnnnnnnnnnnnnnnnnnnnnnnnnnnnnnnnnnnnnnnnnnnnnnnnnnnnnnnnnnnnnnnnnnnnnnnnnnnnnnnnnnnnnnnnnnnnnnnnnnnnnnnnnnnnnnnnnnnnnnnnnnnnnnnnnnnnnnnnnnnnnnnnnnnnnnnnnnnnnnnnnnnnnnnnnnnnnnnnnnnnnnnnnnnnnnnnnnnnnnnnnnnnnnnnnnnnnnnnnnnnnnnnnnnnnnnnnnnnnnnnnnnnnnnnnnnnnnnnnnnnnnnnnnnnnnnnnnnnnnnnnnnnnnnnnnnnnnnnnnnnnnnnnnnnnnnnnnnnnnnnnnnnnnnnnnnnnnnnnnnnnnnnnnnnnnnnnnnnnnnnnnnnnnnnnnnnnnnnnnnnnnnnnnnnnnnnnnnnnnnnnnnnnnnnnnnnnnnnnnnnnnnnnnnnnnnnnnnnnnnnnnnnnnnnnnnnnnnnnnnnnnnnnnnnnnnnnnnnnnnnnnnnnnnnnnnnnnnnnnnnnnnnnnnnnnnnnnnnnnnnnnnnnnnnnnnnnnnnnnnnnnnnnnnnnnnnnnnnnnnnnnnnnnnnnnnnnnnnnnnnnnnnnnnnnnnnnnnnnnnnnnnnnnnnnnnnnnnnnnnnnnnnnnnnnnnnnnnnnnnnnnnnnnnnnnnnnnnnnnnnnnnnnnnnnnnnnnnnnnnnnnnnnnnnnnnnnnnnnnnnnnnnnnnnnnnnnnnnnnnnnnnnnnnnnnnnnnnnnnnnnnnnnnnnnnnnnnnnnnnnnnnnnnnnnnnnnnnnnnnnnnnnnnnnnnnnnnnnnnnnnnnnnnnnnnnnnnnnnnnnnnnnnnnnnnnnnnnnnnnnnnnnnnnnnnnnnnnnnnnnnnnnnnnnnnnnnnnnnnnnnnnnnnnnnnnnnnnnnnnnnnnnnnnnnnnnnnnnnnnnnnnnnnnnnnnnnnnnnnnnnnnnnnnnnnnnnnnnnnnnnnnnnnnnnnnnnnnnnnnnnnnnnnnnnnnnnnnnnnnnnnnnnnnnnnnnnnnnnnnnnnnnnnnnnnnnnnnnnnnnnnnnnnnnnnnnnnnnnnnnnnnnnnnnnnnnnnnnnnnnnnnnnnnnnnnnnnnnnnnnnnnnnnnnnnnnnnnnnnnnnnnnnnnnnnnnnnnnnnnnnnnnnnnnnnnnnnnnnnnnnnnnnnnnnnnnnnnnnnnnnnnnnnnnnnnnnnnnnnnnnnnnnnnnnnnnnnnnnnnnnnnnnnnnnnnnnnnnnnnnnnnnnnnnnnnnnnnnnnnnnnnnnnnnnnnnnnnnnnnnnnnnnnnnnnnnnnnnnnnnnnnnnnnnnnnnnnnnnnnnnnnnnnnnnnnnnnnnnnnnnnnnnnnnnnnnnnnnnnnnnnnnnnnnnnnnnnnnnnnnnnnnnnnnnnnnnnnnnnnnnnnnnnnnnnnnnnnnnnnnnnnnnnnnnnnnnnnnnnnnnnnnnnnnnnnnnnnnnnnnnnnnnnnnnnnnnnnnnnnnnnnnnnnnnnnnnnnnnnnnnnnnnnnnnnnnnnnnnnnnnnnnnnnnnnnnnnnnnnnnnnnnnnnnnnnnnnnnnnnnnnnnnnnnnnnnnnnnnnnnnnnnnnnnnnnnnnnnnnnnnnnnnnnnnnnnnnnnnnnnnnnnnnnnnnnnnnnnnnnnnnnnnnnnnnnnnnnnnnnnnnnnnnnnnnnnnnnnnnnnnnnnnnnnnnnnnnnnnnnnnnnnnnnnnnnnnnnnnnnnnnnnnnnnnnnnnnnnnnnnnnnnnnnnnnnnnnnnnnnnnnnnnnnnnnnnnnnnnnnnnnnnnnnnnnnnnnnnnnnnnnnnnnnnnnnnnnnnnnnnnnnnnnnnnnnnnnnnnnnnnnnnnnnnnnnnnnnnnnnnnnnnnnnnnnnnnnnnnnnnnnnnnnnnnnnnnnnnnnnnnnnnnnnnnnnnnnnnnnnnnnnnnnnnnnnnnnnnnnnnnnnnnnnnnnnnnnnnnnnnnnnnnnnnnnnnnnnnnnnnnnnnnnnnnnnnnnnnnnnnnnnnnnnnnnnnnnnnnnnnnnnnnnnnnnnnnnnnnnnnnnnnnnnnnnnnnnnnnnnnnnnnnnnnnnnnnnnnnnnnnnnnnnnnnnnnnnnnnnnnnnnnnnnnnnnnnnnnnnnnnnnnnnnnnnnnnnnnnnnnnnnnnnnnnnnnnnnnnnnnnnnnnnnnnnnnnnnnnnnnnnnnnnnnnnnnnnnnnnnnnnnnnnnnnnnnnnnnnnnnnnnnnnnnnnnnnnnnnnnnnnnnnnnnnnnnnnnnnnnnnnnnnnnnnnnnnnnnnnnnnnnnnnnnnnnnnnnnnnnnnnnnnnnnnnnnnnnnnnnnnnnnnnnnnnnnnnnnnnnnnnnnnnnnnnnnnnnnnnnnnnnnnnnnnnnnnnnnnnnnnnnnnnnnnnnnnnnnnnnnnnnnnnnnnnnnnnnnnnnnnnnnnnnnnnnnnnnnnnnnnnnnnnnnnnnnnnnnnnnnnnnnnnnnnnnnnnnnnnnnnnnnnnnnnnnnnnnnnnnnnnnnnnnnnnnnnnnnnnnnnnnnnnnnnnnnnnnnnnnnnnnnnnnnnnnnnnnnnnnnnnnnnnnnnnnnnnnnnnnnnnnnnnnnnnnnnnnnnnnnnnnnnnnnnnnnnnnnnnnnnnnnnnnnnnnnnnnnnnnnnnnnnnnnnnnnnnnnnnnnnnnnnnnnnnnnnnnnnnnnnnnnnnnnnnnnnnnnnnnnnnnnnnnnnnnnnnnnnnnnnnnnnnnnnnnnnnnnnnnnnnnnnnnnnnnnnnnnnnnnnnnnnnnnnnnnnnnnnnnnnnnnnnnnnnnnnnnnnnnnnnnnnnnnnnnnnnnnnnnnnnnnnnnnnnnnnnnnnnnnnnnnnnnnnnnnnnnnnnnnnnnnnnnnnnnnnnnnnnnnnnnnnnnnnnnnnnnnnnnnnnnnnnnnnnnnnnnnnnnnnnnnnnnnnnnnnnnnnnnnnnnnnnnnnnnnnnnnnnnnnnnnnnnnnnnnnnnnnnnnnnnnnnnnnnnnnnnnnnnnnnnnnnnnnnnnnnnnnnnnnnnnnnnnnnnnnnnnnnnnnnnnnnnnnnnnnnnnnnnnnnnnnnnnnnnnnnnnnnnnnnnnnnnnnnnnnnnnnnnnnnnnnnnnnnnnnnnnnnnnnnnnnnnnnnnnnnnnnnnnnnnnnnnnnnnnnnnnnnnnnnnnnnnnnnnnnnnnnnnnnnnnnnnnnnnnnnnnnnnnnnnnnnnnnnnnnnnnnnnnnnnnnnnnnnnnnnnnnnnnnnnnnnnnnnnnnnnnnnnnnnnnnnnnnnnnnnnnnnnnnnnnnnnnnnnnnnnnnnnnnnnnnnnnnnnnnnnnnnnnnnnnnnnnnnnnnnnnnnnnnnnnnnnnnnnnnnnnnnnnnnnnnnnnnnnnnnnnnnnnnnnnnnnnnnnnnnnnnnnnnnnnnnnnnnnnnnnnnnnnnnnnnnnnnnnnnnnnnnnnnnnnnnnnnnnnnnnnnnnnnnnnnnnnnnnnnnnnnnnnnnnnnnnnnnnnnnnnnnnnnnnnnnnnnnnnnnnnnnnnnnnnnnnnnnnnnnnnnnnnnnnnnnnnnnnnnnnnnnnnnnnnnnnnnnnnnnnnnnnnnnnnnnnnnnnnnnnnnnnnnnnnnnnnnnnnnnnnnnnnnnnnnnnnnnnnnnnnnnnnnnnnnnnnnnnnnnnnnnnnnnnnnnnnnnnnnnnnnnnnnnnnnnnnnnnnnnnnnnnnnnnnnnnnnnnnnnnnnnnnnnnnnnnnnnnnnnnnnnnnnnnnnnnnnnnnnnnnnnnnnnnnnnnnnnnnnnnnnnnnnnnnnnnnnnnnnnnnnnnnnnnnnnnnnnnnnnnnnnnnnnnnnnnnnnnnnnnnnnnnnnnnnnnnnnnnnnnnnnnnnnnnnnnnnnnnnnnnnnnnnnnnnnnnnnnnnnnnnnnnnnnnnnnnnnnnnnnnnnnnnnnnnnnnnnnnnnnnnnnnnnnnnnnnnnnnnnnnnnnnnnnnnnnnnnnnnnnnnnnnnnnnnnnnnnnnnnnnnnnnnnnnnnnnnnnnnnnnnnnnnnnnnnnnnnnnnnnnnnnnnnnnnnnnnnnnnnnnnnnnnnnnnnnnnnnnnnnnnnnnnnnnnnnnnnnnnnnnnnnnnnnnnnnnnnnnnnnnnnnnnnnnnnnnnnnnnnnnnnnnnnnnnnnnnnnnnnnnnnnnnnnnnnnnnnnnnnnnnnnnnnnnnnnnnnnnnnnnnnnnnnnnnnnnnnnnnnnnnnnnnnnnnnnnnnnnnnnnnnnnnnnnnnnnnnnnnnnnnnnnnnnnnnnnnnnnnnnnnnnnnnnnnnnnnnnnnnnnnnnnnnnnnnnnnnnnnnnnnnnnnnnnnnnnnnnnnnnnnnnnnnnnnnnnnnnnnnnnnnnnnnnnnnnnnnnnnnnnnnnnnnnnnnnnnnnnnnnnnnnnnnnnnnnnnnnnnnnnnnnnnnnnnnnnnnnnnnnnnnnnnnnnnnnnnnnnnnnnnnnnnnnnnnnnnnnnnnnnnnnnnnnnnnnnnnnnnnnnnnnnnnnnnnnnnnnnnnnnnnnnnnnnnnnnnnnnnnnnnnnnnnnnnnnnnnnnnnnnnnnnnnnnnnnnnnnnnnnnnnnnnnnnnnnnnnnnnnnnnnnnnnnnnnnnnnnnnnnnnnnnnnnnnnnnnnnnnnnnnnnnnnnnnnnnnnnnnnnnnnnnnnnnnnnnnnnnnnnnnnnnnnnnnnnnnnnnnnnnnnnnnnnnnnnnnnnnnnnnnnnnnnnnnnnnnnnnnnnnnnnnnnnnnnnnnnnnnnnnnnnnnnnnnnnnnnnnnnnnnnnnnnnnnnnnnnnnnnnnnnnnnnnnnnnnnnnnnnnnnnnnnnnnnnnnnnnnnnnnnnnnnnnnnnnnnnnnnnnnnnnnnnnnnnnnnnnnnnnnnnnnnnnnnnnnnnnnnnnnnnnnnnnnnnnnnnnnnnnnnnnnnnnnnnnnnnnnnnnnnnnnnnnnnnnnnnnnnnnnnnnnnnnnnnnnnnnnnnnnnnnnnnnnnnnnnnnnnnnnnnnnnnnnnnnnnnnnnnnnnnnnnnnnnnnnnnnnnnnnnnnnnnnnnnnnnnnnnnnnnnnnnnnnnnnnnnnnnnnnnnnnnnnnnnnnnnnnnnnnnnnnnnnnnnnnnnnnnnnnnnnnnnnnnnnnnnnnnnnnnnnnnnnnnnnnnnnnnnnnnnnnnnnnnnnnnnnnnnnnnnnnnnnnnnnnnnnnnnnnnnnnnnnnnnnnnnnnnnnnnnnnnnnnnnnnnnnnnnnnnnnnnnnnnnnnnnnnnnnnnnnnnnnnnnnnnnnnnnnnnnnnnnnnnnnnnnnnnnnnnnnnnnnnnnnnnnnnnnnnnnnnnnnnnnnnnnnnnnnnnnnnnnnnnnnnnnnnnnnnnnnnnnnnnnnnnnnnnnnnnnnnnnnnnnnnnnnnnnnnnnnnnnnnnnnnnnnnnnnnnnnnnnnnnnnnnnnnnnnnnnnnnnnnnnnnnnnnnnnnnnnnnnnnnnnnnnnnnnnnnnnnnnnnnnnnnnnnnnnnnnnnnnnnnnnnnnnnnnnnnnnnnnnnnnnnnnnnnnnnnnnnnnnnnnnnnnnnnnnnnnnnnnnnnnnnnnnnnnnnnnnnnnnnnnnnnnnnnnnnnnnnnnnnnnnnnnnnnnnnnnnnnnnnnnnnnnnnnnnnnnnnnnnnnnnnnnnnnnnnnnnnnnnnnnnnnnnnnnnnnnnnnnnnnnnnnnnnnnnnnnnnnnnnnnnnnnnnnnnnnnnnnnnnnnnnnnnnnnnnnnnnnnnnnnnnnnnnnnnnnnnnnnnnnnnnnnnnnnnnnnnnnnnnnnnnnnnnnnnnnnnnnnnnnnnnnnnnnnnnnnnnnnnnnnnnnnnnnnnnnnnnnnnnnnnnnnnnnnnnnnnnnnnnnnnnnnnnnnnnnnnnnnnnnnnnnnnnnnnnnnnnnnnnnnnnnnnnnnnnnnnnnnnnnnnnnnnnnnnnnnnnnnnnnnnnnnnnnnnnnnnnnnnnnnnnnnnnnnnnnnnnnnnnnnnnnnnnnnnnnnnnnnnnnnnnnnnnnnnnnnnnnnnnnnnnnnnnnnnnnnnnnnnnnnnnnnnnnnnnnnnnnnnnnnnnnnnnnnnnnnnnnnnnnnnnnnnnnnnnnnnnnnnnnnnnnnnnnnnnnnnnnnnnnnnnnnnnnnnnnnnnnnnnnnnnnnnnnnnnnnnnnnnnnnnnnnnnnnnnnnnnnnnnnnnnnnnnnnnnnnnnnnnnnnnnnnnnnnnnnnnnnnnnnnnnnnnnnnnnnnnnnnnnnnnnnnnnnnnnnnnnnnnnnnnnnnnnnnnnnnnnnnnnnnnnnnnnnnnnnnnnnnnnnnnnnnnnnnnnnnnnnnnnnnnnnnnnnnnnnnnnnnnnnnnnnnnnnnnnnnnnnnnnnnnnnnnnnnnnnnnnnnnnnnnnnnnnnnnnnnnnnnnnnnnnnnnnnnnnnnnnnnnnnnnnnnnnnnnnnnnnnnnnnnnnnnnnnnnnnnnnnnnnnnnnnnnnnnnnnnnnnnnnnnnnnnnnnnnnnnnnnnnnnnnnnnnnnnnnnnnnnnnnnnnnnnnnnnnnnnnnnnnnnnnnnnnnnnnnnnnnnnnnnnnnnnnnnnnnnnnnnnnnnnnnnnnnnnnnnnnnnnnnnnnnnnnnnnnnnnnnnnnnnnnnnnnnnnnnnnnnnnnnnnnnnnnnnnnnnnnnnnnnnnnnnnnnnnnnnnnnnnnnnnnnnnnnnnnnnnnnnnnnnnnnnnnnnnnnnnnnnnnnnnnnnnnnnnnnnnnnnnnnnnnnnnnnnnnnnnnnnnnnnnnnnnnnnnnnnnnnnnnnnnnnnnnnnnnnnnnnnnnnnnnnnnnnnnnnnnnnnnnnnnnnnnnnnnnnnnnnnnnnnnnnnnnnnnnnnnnnnnnnnnnnnnnnnnnnnnnnnnnnnnnnnnnnnnnnnnnnnnnnnnnnnnnnnnnnnnnnnnnnnnnnnnnnnnnnnnnnnnnnnnnnnnnnnnnnnnnnnnnnnnnnnnnnnnnnnnnnnnnnnnnnnnnnnnnnnnnnnnnnnnnnnnnnnnnnnnnnnnnnnnnnnnnnnnnnnnnnnnnnnnnnnnnnnnnnnnnnnnnnnnnnnnnnnnnnnnnnnnnnnnnnnnnnnnnnnnnnnnnnnnnnnnnnnnnnnnnnnnnnnnnnnnnnnnnnnnnnnnnnnnnnnnnnnnnnnnnnnnnnnnnnnnnnnnnnnnnnnnnnnnnnnnnnnnnnnnnnnnnnnnnnnnnnnnnnnnnnnnnnnnnnnnnnnnnnnnnnnnnnnnnnnnnnnnnnnnnnnnnnnnnnnnnnnnnnnnnnnnnnnnnnnnnnnnnnnnnnnnnnnnnnnnnnnnnnnnnnnnnnnnnnnnnnnnnnnnnnnnnnnnnnnnnnnnnnnnnnnnnnnnnnnnnnnnnnnnnnnnnnnnnnnnnnnnnnnnnnnnnnnnnnnnnnnnnnnnnnnnnnnnnnnnnnnnnnnnnnnnnnnnnnnnnnnnnnnnnnnnnnnnnnnnnnnnnnnnnnnnnnnnnnnnnnnnnnnnnnnnnnnnnnnnnnnnnnnnnnnnnnnnnnnnnnnnnnnnnnnnnnnnnnnnnnnnnnnnnnnnnnnnnnnnnnnnnnnnnnnnnnnnnnnnnnnnnnnnnnnnnnnnnnnnnnnnnnnnnnnnnnnnnnnnnnnnnnnnnnnnnnnnnnnnnnnnnnnnnnnnnnnnnnnnnnnnnnnnnnnnnnnnnnnnnnnnnnnnnnnnnnnnnnnnnnnnnnnnnnnnnnnnnnnnnnnnnnnnnnnnnnnnnnnnnnnnnnnnnnnnnnnnnnnnnnnnnnnnnnnnnnnnnnnnnnnnnnnnnnnnnnnnnnnnnnnnnnnnnnnnnnnnnnnnnnnnnnnnnnnnnnnnnnnnnnnnnnnnnnnnnnnnnnnnnnnnnnnnnnnnnnnnnnnnnnnnnnnnnnnnnnnnnnnnnnnnnnnnnnnnnnnnnnnnnnnnnnnnnnnnnnnnnnnnnnnnnnnnnnnnnnnnnnnnnnnnnnnnnnnnnnnnnnnnnnnnnnnnnnnnnnnnnnnnnnnnnnnnnnnnnnnnnnnnnnnnnnnnnnnnnnnnnnnnnnnnnnnnnnnnnnnnnnnnnnnnnnnnnnnnnnnnnnnnnnnnnnnnnnnnnnnnnnnnnnnnnnnnnnnnnnnnnnnnnnnnnnnnnnnnnnnnnnnnnnnnnnnnnnnnnnnnnnnnnnnnnnnnnnnnnnnnnnnnnnnnnnnnnnnnnnnnnnnnnnnnnnnnnnnnnnnnnnnnnnnnnnnnnnnnnnnnnnnnnnnnnnnnnnnnnnnnnnnnnnnnnnnnnnnnnnnnnnnnnnnnnnnnnnnnnnnnnnnnnnnnnnnnnnnnnnnnnnnnnnnnnnnnnnnnnnnnnnnnnnnnnnnnnnnnnnnnnnnnnnnnnnnnnnnnnnnnnnnnnnnnnnnnnnnnnnnnnnnnnnnnnnnnnnnnnnnnnnnnnnnnnnnnnnnnnnnnnnnnnnnnnnnnnnnnnnnnnnnnnnnnnnnnnnnnnnnnnnnnnnnnnnnnnnnnnnnnnnnnnnnnnnnnnnnnnnnnnnnnnnnnnnnnnnnnnnnnnnnnnnnnnnnnnnnnnnnnnnnnnnnnnnnnnnnnnnnnnnnnnnnnnnnnnnnnnnnnnnnnnnnnnnnnnnnnnnnnnnnnnnnnnnnnnnnnnnnnnnnnnnnnnnnnnnnnnnnnnnnnnnnnnnnnnnnnnnnnnnnnnnnnnnnnnnnnnnnnnnnnnnnnnnnnnnnnnnnnnnnnnnnnnnnnnnnnnnnnnnnnnnnnnnnnnnnnnnnnnnnnnnnnnnnnnnnnnnnnnnnnnnnnnnnnnnnnnnnnnnnnnnnnnnnnnnnnnnnnnnnnnnnnnnnnnnnnnnnnnnnnnnnnnnnnnnnnnnnnnnnnnnnnnnnnnnnnnnnnnnnnnnnnnnnnnnnnnnnnnnnnnnnnnnnnnnnnnnnnnnnnnnnnnnnnnnnnnnnnnnnnnnnnnnnnnnnnnnnnnnnnnnnnnnnnnnnnnnnnnnnnnnnnnnnnnnnnnnnnnnnnnnnnnnnnnnnnnnnnnnnnnnnnnnnnnnnnnnnnnnnnnnnnnnnnnnnnnnnnnnnnnnnnnnnnnnnnnnnnnnnnnnnnnnnnnnnnnnnnnnnnnnnnnnnnnnnnnnnnnnnnnnnnnnnnnnnnnnnnnnnnnnnnnnnnnnnnnnnnnnnnnnnnnnnnnnnnnnnnnnnnnnnnnnnnnnnnnnnnnnnnnnnnnnnnnnnnnnnnnnnnnnnnnnnnnnnnnnnnnnnnnnnnnnnnnnnnnnnnnnnnnnnnnnnnnnnnnnnnnnnnnnnnnnnnnnnnnnnnnnnnnnnnnnnnnnnnnnnnnnnnnnnnnnnnnnnnnnnnnnnnnnnnnnnnnnnnnnnnnnnnnnnnnnnnnnnnnnnnnnnnnnnnnnnnnnnnnnnnnnnnnnnnnnnnnnnnnnnnnnnnnnnnnnnnnnnnnnnnnnnnnnnnnnnnnnnnnnnnnnnnnnnnnnnnnnnnnnnnnnnnnnnnnnnnnnnnnnnnnnnnnnnnnnnnnnnnnnnnnnnnnnnnnnnnnnnnnnnnnnnnnnnnnnnnnnnnnnnnnnnnnnnnnnnnnnnnnnnnnnnnnnnnnnnnnnnnnnnnnnnnnnnnnnnnnnnnnnnnnnnnnnnnnnnnnnnnnnnnnnnnnnnnnnnnnnnnnnnnnnnnnnnnnnnnnnnnnnnnnnnnnnnnnnnnnnnnnnnnnnnnnnnnnnnnnnnnnnnnnnnnnnnnnnnnnnnnnnnnnnnnnnnnnnnnnnnnnnnnnnnnnnnnnnnnnnnnnnnnnnnnnnnnnnnnnnnnnnnnnnnnnnnnnnnnnnnnnnnnnnnnnnnnnnnnnnnnnnnnnnnnnnnnnnnnnnnnnnnnnnnnnnnnnnnnnnnnnnnnnnnnnnnnnnnnnnnnnnnnnnnnnnnnnnnnnnnnnnnnnnnnnnnnnnnnnnnnnnnnnnnnnnnnnnnnnnnnnnnnnnnnnnnnnnnnnnnnnnnnnnnnnnnnnnnnnnnnnnnnnnnnnnnnnnnnnnnnnnnnnnnnnnnnnnnnnnnnnnnnnnnnnnnnnnnnnnnnnnnnnnnnnnnnnnnnnnnnnnnnnnnnnnnnnnnnnnnnnnnnnnnnnnnnnnnnnnnnnnnnnnnnnnnnnnnnnnnnnnnnnnnnnnnnnnnnnnnnnnnnnnnnnnnnnnnnnnnnnnnnnnnnnnnnnnnnnnnnnnnnnnnnnnnnnnnnnnnnnnnnnnnnnnnnnnnnnnnnnnnnnnnnnnnnnnnnnnnnnnnnnnnnnnnnnnnnnnnnnnnnnnnnnnnnnnnnnnnnnnnnnnnnnnnnnnnnnnnnnnnnnnnnnnnnnnnnnnnnnnnnnnnnnnnnnnnnnnnnnnnnnnnnnnnnnnnnnnnnnnnnnnnnnnnnnnnnnnnnnnnnnnnnnnnnnnnnnnnnnnnnnnnnnnnnnnnnnnnnnnnnnnnnnnnnnnnnnnnnnnnnnnnnnnnnnnnnnnnnnnnnnnnnnnnnnnnnnnnnnnnnnnnnnnnnnnnnnnnnnnnnnnnnnnnnnnnnnnnnnnnnnnnnnnnnnnnnnnnnnnnnnnnnnnnnnnnnnnnnnnnnnnnnnnnnnnnnnnnnnnnnnnnnnnnnnnnnnnnnnnnnnnnnnnnnnnnnnnnnnnnnnnnnnnnnnnnnnnnnnnnnnnnnnnnnnnnnnnnnnnnnnnnnnnnnnnnnnnnnnnnnnnnnnnnnnnnnnnnnnnnnnnnnnnnnnnnnnnnnnnnnnnnnnnnnnnnnnnnnnnnnnnnnnnnnnnnnnnnnnnnnnnnnnnnnnnnnnnnnnnnnnnnnnnnnnnnnnnnnnnnnnnnnnnnnnnnnnnnnnnnnnnnnnnnnnnnnnnnnnnnnnnnnnnnnnnnnnnnnnnnnnnnnnnnnnnnnnnnnnnnnnnnnnnnnnnnnnnnnnnnnnnnnnnnnnnnnnnnnnnnnnnnnnnnnnnnnnnnnnnnnnnnnnnnnnnnnnnnnnnnnnnnnnnnnnnnnnnnnnnnnnnnnnnnnnnnnnnnnnnnnnnnnnnnnnnnnnnnnnnnnnnnnnnnnnnnnnnnnnnnnnnnnnnnnnnnnnnnnnnnnnnnnnnnnnnnnnnnnnnnnnnnnnnnnnnnnnnnnnnnnnnnnnnnnnnnnnnnnnnnnnnnnnnnnnnnnnnnnnnnnnnnnnnnnnnnnnnnnnnnnnnnnnnnnnnnnnnnnnnnnnnnnnnnnnnnnnnnnnnnnnnnnnnnnnnnnnnnnnnnnnnnnnnnnnnnnnnnnnnnnnnnnnnnnnnnnnnnnnnnnnnnnnnnnnnnnnnnnnnnnnnnnnnnnnnnnnnnnnnnnnnnnnnnnnnnnnnnnnnnnnnnnnnnnnnnnnnnnnnnnnnnnnnnnnnnnnnnnnnnnnnnnnnnnnnnnnnnnnnnnnnnnnnnnnnnnnnnnnnnnnnnnnnnnnnnnnnnnnnnnnnnnnnnnnnnnnnnnnnnnnnnnnnnnnnnnnnnnnnnnnnnnnnnnnnnnnnnnnnnnnnnnnnnnnnnnnnnnnnnnnnnnnnnnnnnnnnnnnnnnnnnnnnnnnnnnnnnnnnnnnnnnnnnnnnnnnnnnnnnnnnnnnnnnnnnnnnnnnnnnnnnnnnnnnnnnnnnnnnnnnnnnnnnnnnnnnnnnnnnnnnnnnnnnnnnnnnnnnnnnnnnnnnnnnnnnnnnnnnnnnnnnnnnnnnnnnnnnnnnnnnnnnnnnnnnnnnnnnnnnnnnnnnnnnnnnnnnnnnnnnnnnnnnnnnnnnnnnnnnnnnnnnnnnnnnnnnnnnnnnnnnnnnnnnnnnnnnnnnnnnnnnnnnnnnnnnnnnnnnnnnnnnnnnnnnnnnnnnnnnnnnnnnnnnnnnnnnnnnnnnnnnnnnnnnnnnnnnnnnnnnnnnnnnnnnnnnnnnnnnnnnnnnnnnnnnnnnnnnnnnnnnnnnnnnnnnnnnnnnnnnnnnnnnnnnnnnnnnnnnnnnnnnnnnnnnnnnnnnnnnnnnnnnnnnnnnnnnnnnnnnnnnnnnnnnnnnnnnnnnnnnnnnnnnnnnnnnnnnnnnnnnnnnnnnnnnnnnnnnnnnnnnnnnnnnnnnnnnnnnnnnnnnnnnnnnnnnnnnnnnnnnnnnnnnnnnnnnnnnnnnnnnnnnnnnnnnnnnnnnnnnnnnnnnnnnnnnnnnnnnnnnnnnnnnnnnnnnnnnnnnnnnnnnnnnnnnnnnnnnnnnnnnnnnnnnnnnnnnnnnnnnnnnnnnnnnnnnnnnnnnnnnnnnnnnnnnnnnnnnnnnnnnnnnnnnnnnnnnnnnnnnnnnnnnnnnnnnnnnnnnnnnnnnnnnnnnnnnnnnnnnnnnnnnnnnnnnnnnnnnnnnnnnnnnnnnnnnnnnnnnnnnnnnnnnnnnnnnnnnnnnnnnnnnnnnnnnnnnnnnnnnnnnnnnnnnnnnnnnnnnnnnnnnnnnnnnnnnnnnnnnnnnnnnnnnnnnnnnnnnnnnnnnnnnnnnnnnnnnnnnnnnnnnnnnnnnnnnnnnnnnnnnnnnnnnnnnnnnnnnnnnnnnnnnnnnnnnnnnnnnnnnnnnnnnnnnnnnnnnnnnnnnnnnnnnnnnnnnnnnnnnnnnnnnnnnnnnnnnnnnnnnnnnnnnnnnnnnnnnnnnnnnnnnnnnnnnnnnnnnnnnnnnnnnnnnnnnnnnnnnnnnnnnnnnnnnnnnnnnnnnnnnnnnnnnnnnnnnnnnnnnnnnnnnnnnnnnnnnnnnnnnnnnnnnnnnnnnnnnnnnnnnnnnnnnnnnnnnnnnnnnnnnnnnnnnnnnnnnnnnnnnnnnnnnnnnnnnnnnnnnnnnnnnnnnnnnnnnnnnnnnnnnnnnnnnnnnnnnnnnnnnnnnnnnnnnnnnnnnnnnnnnnnnnnnnnnnnnnnnnnnnnnnnnnnnnnnnnnnnnnnnnnnnnnnnnnnnnnnnnnnnnnnnnnnnnnnnnnnnnnnnnnnnnnnnnnnnnnnnnnnnnnnnnnnnnnnnnnnnnnnnnnnnnnnnnnnnnnnnnnnnnnnnnnnnnnnnnnnnnnnnnnnnnnnnnnnnnnnnnnnnnnnnnnnnnnnnnnnnnnnnnnnnnnnnnnnnnnnnnnnnnnnnnnnnnnnnnnnnnnnnnnnnnnnnnnnnnnnnnnnnnnnnnnnnnnnnnnnnnnnnnnnnnnnnnnnnnnnnnnnnnnnnnnnnnnnnnnnnnnnnnnnnnnnnnnnnnnnnnnnnnnnnnnnnnnnnnnnnnnnnnnnnnnnnnnnnnnnnnnnnnnnnnnnnnnnnnnnnnnnnnnnnnnnnnnnnnnnnnnnnnnnnnnnnnnnnnnnnnnnnnnnnnnnnnnnnnnnnnnnnnnnnnnnnnnnnnnnnnnnnnnnnnnnnnnnnnnnnnnnnnnnnnnnnnnnnnnnnnnnnnnnnnnnnnnnnnnnnnnnnnnnnnnnnnnnnnnnnnnnnnnnnnnnnnnnnnnnnnnnnnnnnnnnnnnnnnnnnnnnnnnnnnnnnnnnnnnnnnnnnnnnnnnnnnnnnnnnnnnnnnnnnnnnnnnnnnnnnnnnnnnnnnnnnnnnnnnnnnnnnnnnnnnnnnnnnnnnnnnnnnnnnnnnnnnnnnnnnnnnnnnnnnnnnnnnnnnnnnnnnnnnnnnnnnnnnnnnnnnnnnnnnnnnnnnnnnnnnnnnnnnnnnnnnnnnnnnnnnnnnnnnnnnnnnnnnnnnnnnnnnnnnnnnnnnnnnnnnnnnnnnnnnnnnnnnnnnnnnnnnnnnnnnnnnnnnnnnnnnnnnnnnnnnnnnnnnnnnnnnnnnnnnnnnnnnnnnnnnnnnnnnnnnnnnnnnnnnnnnnnnnnnnnnnnnnnnnnnnnnnnnnnnnnnnnnnnnnnnnnnnnnnnnnnnnnnnnnnnnnnnnnnnnnnnnnnnnnnnnnnnnnnnnnnnnnnnnnnnnnnnnnnnnnnnnnnnnnnnnnnnnnnnnnnnnnnnnnnnnnnnnnnnnnnnnnnnnnnnnnnnnnnnnnnnnnnnnnnnnnnnnnnnnnnnnnnnnnnnnnnnnnnnnnnnnnnnnnnnnnnnnnnnnnnnnnnnnnnnnnnnnnnnnnnnnnnnnnnnnnnnnnnnnnnnnnnnnnnnnnnnnnnnnnnnnnnnnnnnnnnnnnnnnnnnnnnnnnnnnnnnnnnnnnnnnnnnnnnnnnnnnnnnnnnnnnnnnnnnnnnnnnnnnnnnnnnnnnnnnnnnnnnnnnnnnnnnnnnnnnnnnnnnnnnnnnnnnnnnnnnnnnnnnnnnnnnnnnnnnnnnnnnnnnnnnnnnnnnnnnnnnnnnnnnnnnnnnnnnnnnnnnnnnnnnnnnnnnnnnnnnnnnnnnnnnnnnnnnnnnnnnnnnnnnnnnnnnnnnnnnnnnnnnnnnnnnnnnnnnnnnnnnnnnnnnnnnnnnnnnnnnnnnnnnnnnnnnnnnnnnnnnnnnnnnnnnnnnnnnnnnnnnnnnnnnnnnnnnnnnnnnnnnnnnnnnnnnnnnnnnnnnnnnnnnnnnnnnnnnnnnnnnnnnnnnnnnnnnnnnnnnnnnnnnnnnnnnnnnnnnnnnnnnnnnnnnnnnnnnnnnnnnnnnnnnnnnnnnnnnnnnnnnnnnnnnnnnnnnnnnnnnnnnnnnnnnnnnnnnnnnnnnnnnnnnnnnnnnnnnnnnnnnnnnnnnnnnnnnnnnnnnnnnnnnnnnnnnnnnnnnnnnnnnnnnnnnnnnnnnnnnnnnnnnnnnnnnnnnnnnnnnnnnnnnnnnnnnnnnnnnnnnnnnnnnnnnnnnnnnnnnnnnnnnnnnnnnnnnnnnnnnnnnnnnnnnnnnnnnnnnnnnnnnnnnnnnnnnnnnnnnnnnnnnnnnnnnnnnnnnnnnnnnnnnnnnnnnnnnnnnnnnnnnnnnnnnnnnnnnnnnnnnnnnnnnnnnnnnnnnnnnnnnnnnnnnnnnnnnnnnnnnnnnnnnnnnnnnnnnnnnnnnnnnnnnnnnnnnnnnnnnnnnnnnnnnnnnnnnnnnnnnnnnnnnnnnnnnnnnnnnnnnnnnnnnnnnnnnnnnnnnnnnnnnnnnnnnnnnnnnnnnnnnnnnnnnnnnnnnnnnnnnnnnnnnnnnnnnnnnnnnnnnnnnnnnnnnnnnnnnnnnnnnnnnnnnnnnnnnnnnnnnnnnnnnnnnnnnnnnnnnnnnnnnnnnnnnnnnnnnnnnnnnnnnnnnnnnnnnnnnnnnnnnnnnnnnnnnnnnnnnnnnnnnnnnnnnnnnnnnnnnnnnnnnnnnnnnnnnnnnnnnnnnnnnnnnnnnnnnnnnnnnnnnnnnnnnnnnnnnnnnnnnnnnnnnnnnnnnnnnnnnnnnnnnnnnnnnnnnnnnnnnnnnnnnnnnnnnnnnnnnnnnnnnnnnnnnnnnnnnnnnnnnnnnnnnnnnnnnnnnnnnnnnnnnnnnnnnnnnnnnnnnnnnnnnnnnnnnnnnnnnnnnnnnnnnnnnnnnnnnnnnnnnnnnnnnnnnnnnnnnnnnnnnnnnnnnnnnnnnnnnnnnnnnnnnnnnnnnnnnnnnnnnnnnnnnnnnnnnnnnnnnnnnnnnnnnnnnnnnnnnnnnnnnnnnnnnnnnnnnnnnnnnnnnnnnnnnnnnnnnnnnnnnnnnnnnnnnnnnnnnnnnnnnnnnnnnnnnnnnnnnnnnnnnnnnnnnnnnnnnnnnnnnnnnnnnnnnnnnnnnnnnnnnnnnnnnnnnnnnnnnnnnnnnnnnnnnnnnnnnnnnnnnnnnnnnnnnnnnnnnnnnnnnnnnnnnnnnnnnnnnnnnnnnnnnnnnnnnnnnnnnnnnnnnnnnnnnnnnnnnnnnnnnnnnnnnnnnnnnnnnnnnnnnnnnnnnnnnnnnnnnnnnnnnnnnnnnnnnnnnnnnnnnnnnnnnnnnnnnnnnnnnnnnnnnnnnnnnnnnnnnnnnnnnnnnnnnnnnnnnnnnnnnnnnnnnnnnnnnnnnnnnnnnnnnnnnnnnnnnnnnnnnnnnnnnnnnnnnnnnnnnnnnnnnnnnnnnnnnnnnnnnnnnnnnnnnnnnnnnnnnnnnnnnnnnnnnnnnnnnnnnnnnnnnnnnnnnnnnnnnnnnnnnnnnnnnnnnnnnnnnnnnnnnnnnnnnnnnnnnnnnnnnnnnnnnnnnnnnnnnnnnnnnnnnnnnnnnnnnnnnnnnnnnnnnnnnnnnnnnnnnnnnnnnnnnnnnnnnnnnnnnnnnnnnnnnnnnnnnnnnnnnnnnnnnnnnnnnnnnnnnnnnnnnnnnnnnnnnnnnnnnnnnnnnnnnnnnnnnnnnnnnnnnnnnnnnnnnnnnnnnnnnnnnnnnnnnnnnnnnnnnnnnnnnnnnnnnnnnnnnnnnnnnnnnnnnnnnnnnnnnnnnnnnnnnnnnnnnnnnnnnnnnnnnnnnnnnnnnnnnnnnnnnnnnnnnnnnnnnnnnnnnnnnnnnnnnnnnnnnnnnnnnnnnnnnnnnnnnnnnnnnnnnnnnnnnnnnnnnnnnnnnnnnnnnnnnnnnnnnnnnnnnnnnnnnnnnnnnnnnnnnnnnnnnnnnnnnnnnnnnnnnnnnnnnnnnnnnnnnnnnnnnnnnnnnnnnnnnnnnnnnnnnnnnnnnnnnnnnnnnnnnnnnnnnnnnnnnnnnnnnnnnnnnnnnnnnnnnnnnnnnnnnnnnnnnnnnnnnnnnnnnnnnnnnnnnnnnnnnnnnnnnnnnnnnnnnnnnnnnnnnnnnnnnnnnnnnnnnnnnnnnnnnnnnnnnnnnnnnnnnnnnnnnnnnnnnnnnnnnnnnnnnnnnnnnnnnnnnnnnnnnnnnnnnnnnnnnnnnnnnnnnnnnnnnnnnnnnnnnnnnnnnnnnnnnnnnnnnnnnnnnnnnnnnnnnnnnnnnnnnnnnnnnnnnnnnnnnnnnnnnnnnnnnnnnnnnnnnnnnnnnnnnnnnnnnnnnnnnnnnnnnnnnnnnnnnnnnnnnnnnnnnnnnnnnnnnnnnnnnnnnnnnnnnnnnnnnnnnnnnnnnnnnnnnnnnnnnnnnnnnnnnnnnnnnnnnnnnnnnnnnnnnnnnnnnnnnnnnnnnnnnnnnnnnnnnnnnnnnnnnnnnnnnnnnnnnnnnnnnnnnnnnnnnnnnnnnnnnnnnnnnnnnnnnnnnnnnnnnnnnnnnnnnnnnnnnnnnnnnnnnnnnnnnnnnnnnnnnnnnnnnnnnnnnnnnnnnnnnnnnnnnnnnnnnnnnnnnnnnnnnnnnnnnnnnnnnnnnnnnnnnnnnnnnnnnnnnnnnnnnnnnnnnnnnnnnnnnnnnnnnnnnnnnnnnnnnnnnnnnnnnnnnnnnnnnnnnnnnnnnnnnnnnnnnnnnnnnnnnnnnnnnnnnnnnnnnnnnnnnnnnnnnnnnnnnnnnnnnnnnnnnnnnnnnnnnnnnnnnnnnnnnnnnnnnnnnnnnnnnnnnnnnnnnnnnnnnnnnnnnnnnnnnnnnnnnnnnnnnnnnnnnnnnnnnnnnnnnnnnnnnnnnnnnnnnnnnnnnnnnnnnnnnnnnnnnnnnnnnnnnnnnnnnnnnnnnnnnnnnnnnnnnnnnnnnnnnnnnnnnnnnnnnnnnnnnnnnnnnnnnnnnnnnnnnnnnnnnnnnnnnnnnnnnnnnnnnnnnnnnnnnnnnnnnnnnnnnnnnnnnnnnnnnnnnnnnnnnnnnnnnnnnnnnnnnnnnnnnnnnnnnnnnnnnnnnnnnnnnnnnnnnnnnnnnnnnnnnnnnnnnnnnnnnnnnnnnnnnnnnnnnnnnnnnnnnnnnnnnnnnnnnnnnnnnnnnnnnnnnnnnnnnnnnnnnnnnnnnnnnnnnnnnnnnnnnnnnnnnnnnnnnnnnnnnnnnnnnnnnnnnnnnnnnnnnnnnnnnnnnnnnnnnnnnnnnnnnnnnnnnnnnnnnnnnnnnnnnnnnnnnnnnnnnnnnnnnnnnnnnnnnnnnnnnnnnnnnnnnnnnnnnnnnnnnnnnnnnnnnnnnnnnnnnnnnnnnnnnnnnnnnnnnnnnnnnnnnnnnnnnnnnnnnnnnnnnnnnnnnnnnnnnnnnnnnnnnnnnnnnnnnnnnnnnnnnnnnnnnnnnnnnnnnnnnnnnnnnnnnnnnnnnnnnnnnnnnnnnnnnnnnnnnnnnnnnnnnnnnnnnnnnnnnnnnnnnnnnnnnnnnnnnnnnnnnnnnnnnnnnnnnnnnnnnnnnnnnnnnnnnnnnnnnnnnnnnnnnnnnnnnnnnnnnnnnnnnnnnnnnnnnnnnnnnnnnnnnnnnnnnnnnnnnnnnnnnnnnnnnnnnnnnnnnnnnnnnnnnnnnnnnnnnnnnnnnnnnnnnnnnnnnnnnnnnnnnnnnnnnnnnnnnnnnnnnnnnnnnnnnnnnnnnnnnnnnnnnnnnnnnnnnnnnnnnnnnnnnnnnnnnnnnnnnnnnnnnnnnnnnnnnnnnnnnnnnnnnnnnnnnnnnnnnnnnnnnnnnnnnnnnnnnnnnnnnnnnnnnnnnnnnnnnnnnnnnnnnnnnnnnnnnnnnnnnnnnnnnnnnnnnnnnnnnnnnnnnnnnnnnnnnnnnnnnnnnnnnnnnnnnnnnnnnnnnnnnnnnnnnnnnnnnnnnnnnnnnnnnnnnnnnnnnnnnnnnnnnnnnnnnnnnnnnnnnnnnnnnnnnnnnnnnnnnnnnnnnnnnnnnnnnnnnnnnnnnnnnnnnnnnnnnnnnnnnnnnnnnnnnnnnnnnnnnnnnnnnnnnnnnnnnnnnnnnnnnnnnnnnnnnnnnnnnnnnnnnnnnnnnnnnnnnnnnnnnnnnnnnnnnnnnnnnnnnnnnnnnnnnnnnnnnnnnnnnnnnnnnnnnnnnnnnnnnnnnnnnnnnnnnnnnnnnnnnnnnnnnnnnnnnnnnnnnnnnnnnnnnnnnnnnnnnnnnnnnnnnnnnnnnnnnnnnnnnnnnnnnnnnnnnnnnnnnnnnnnnnnnnnnnnnnnnnnnnnnnnnnnnnnnnnnnnnnnnnnnnnnnnnnnnnnnnnnnnnnnnnnnnnnnnnnnnnnnnnnnnnnnnnnnnnnnnnnnnnnnnnnnnnnnnnnnnnnnnnnnnnnnnnnnnnnnnnnnnnnnnnnnnnnnnnnnnnnnnnnnnnnnnnnnnnnnnnnnnnnnnnnnnnnnnnnnnnnnnnnnnnnnnnnnnnnnnnnnnnnnnnnnnnnnnnnnnnnnnnnnnnnnnnnnnnnnnnnnnnnnnnnnnnnnnnnnnnnnnnnnnnnnnnnnnnnnnnnnnnnnnnnnnnnnnnnnnnnnnnnnnnnnnnnnnnnnnnnnnnnnnnnnnnnnnnnnnnnnnnnnnnnnnnnnnnnnnnnnnnnnnnnnnnnnnnnnnnnnnnnnnnnnnnnnnnnnnnnnnnnnnnnnnnnnnnnnnnnnnnnnnnnnnnnnnnnnnnnnnnnnnnnnnnnnnnnnnnnnnnnnnnnnnnnnnnnnnnnnnnnnnnnnnnnnnnnnnnnnnnnnnnnnnnnnnnnnnnnnnnnnnnnnnnnnnnnnnnnnnnnnnnnnnnnnnnnnnnnnnnnnnnnnnnnnnnnnnnnnnnnnnnnnnnnnnnnnnnnnnnnnnnnnnnnnnnnnnnnnnnnnnnnnnnnnnnnnnnnnnnnnnnnnnnnnnnnnnnnnnnnnnnnnnnnnnnnnnnnnnnnnnnnnnnnnnnnnnnnnnnnnnnnnnnnnnnnnnnnnnnnnnnnnnnnnnnnnnnnnnnnnnnnnnnnnnnnnnnnnnnnnnnnnnnnnnnnnnnnnnnnnnnnnnnnnnnnnnnnnnnnnnnnnnnnnnnnnnnnnnnnnnnnnnnnnnnnnnnnnnnnnnnnnnnnnnnnnnnnnnnnnnnnnnnnnnnnnnnnnnnnnnnnnnnnnnnnnnnnnnnnnnnnnnnnnnnnnnnnnnnnnnnnnnnnnnnnnnnnnnnnnnnnnnnnnnnnnnnnnnnnnnnnnnnnnnnnnnnnnnnnnnnnnnnnnnnnnnnnnnnnnnnnnnnnnnnnnnnnnnnnnnnnnnnnnnnnnnnnnnnnnnnnnnnnnnnnnnnnnnnnnnnnnnnnnnnnnnnnnnnnnnnnnnnnnnnnnnnnnnnnnnnnnnnnnnnnnnnnnnnnnnnnnnnnnnnnnnnnnnnnnnnnnnnnnnnnnnnnnnnnnnnnnnnnnnnnnnnnnnnnnnnnnnnnnnnnnnnnnnnnnnnnnnnnnnnnnnnnnnnnnnnnnnnnnnnnnnnnnnnnnnnnnnnnnnnnnnnnnnnnnnnnnnnnnnnnnnnnnnnnnnnnnnnnnnnnnnnnnnnnnnnnnnnnnnnnnnnnnnnnnnnnnnnnnnnnnnnnnnnnnnnnnnnnnnnnnnnnnnnnnnnnnnnnnnnnnnnnnnnnnnnnnnnnnnnnnnnnnnnnnnnnnnnnnnnnnnnnnnnnnnnnnnnnnnnnnnnnnnnnnnnnnnnnnnnnnnnnnnnnnnnnnnnnnnnnnnnnnnnnnnnnnnnnnnnnnnnnnnnnnnnnnnnnnnnnnnnnnnnnnnnnnnnnnnnnnnnnnnnnnnnnnnnnnnnnnnnnnnnnnnnnnnnnnnnnnnnnnnnnnnnnnnnnnnnnnnnnnnnnnnnnnnnnnnnnnnnnnnnnnnnnnnnnnnnnnnnnnnnnnnnnnnnnnnnnnnnnnnnnnnnnnnnnnnnnnnnnnnnnnnnnnnnnnnnnnnnnnnnnnnnnnnnnnnnnnnnnnnnnnnnnnnnnnnnnnnnnnnnnnnnnnnnnnnnnnnnnnnnnnnnnnnnnnnnnnnnnnnnnnnnnnnnnnnnnnnnnnnnnnnnnnnnnnnnnnnnnnnnnnnnnnnnnnnnnnnnnnnnnnnnnnnnnnnnnnnnnnnnnnnnnnnnnnnnnnnnnnnnnnnnnnnnnnnnnnnnnnnnnnnnnnnnnnnnnnnnnnnnnnnnnnnnnnnnnnnnnnnnnnnnnnnnnnnnnnnnnnnnnnnnnnnnnnnnnnnnnnnnnnnnnnnnnnnnnnnnnnnnnnnnnnnnnnnnnnnnnnnnnnnnnnnnnnnnnnnnnnnnnnnnnnnnnnnnnnnnnnnnnnnnnnnnnnnnnnnnnnnnnnnnnnnnnnnnnnnnnnnnnnnnnnnnnnnnnnnnnnnnnnnnnnnnnnnnnnnnnnnnnnnnnnnnnnnnnnnnnnnnnnnnnnnnnnnnnnnnnnnnnnnnnnnnnnnnnnnnnnnnnnnnnnnnnnnnnnnnnnnnnnnnnnnnnnnnnnnnnnnnnnnnnnnnnnnnnnnnnnnnnnnnnnnnnnnnnnnnnnnnnnnnnnnnnnnnnnnnnnnnnnnnnnnnnnnnnnnnnnnnnnnnnnnnnnnnnnnnnnnnnnnnnnnnnnnnnnnnnnnnnnnnnnnnnnnnnnnnnnnnnnnnnnnnnnnnnnnnnnnnnnnnnnnnnnnnnnnnnnnnnnnnnnnnnnnnnnnnnnnnnnnnnnnnnnnnnnnnnnnnnnnnnnnnnnnnnnnnnnnnnnnnnnnnnnnnnnnnnnnnnnnnnnnnnnnnnnnnnnnnnnnnnnnnnnnnnnnnnnnnnnnnnnnnnnnnnnnnnnnnnnnnnnnnnnnnnnnnnnnnnnnnnnnnnnnnnnnnnnnnnnnnnnnnnnnnnnnnnnnnnnnnnnnnnnnnnnnnnnnnnnnnnnnnnnnnnnnnnnnnnnnnnnnnnnnnnnnnnnnnnnnnnnnnnnnnnnnnnnnnnnnnnnnnnnnnnnnnnnnnnnnnnnnnnnnnnnnnnnnnnnnnnnnnnnnnnnnnnnnnnnnnnnnnnnnnnnnnnnnnnnnnnnnnnnnnnnnnnnnnnnnnnnnnnnnnnnnnnnnnnnnnnnnnnnnnnnnnnnnnnnnnnnnnnnnnnnnnnnnnnnnnnnnnnnnnnnnnnnnnnnnnnnnnnnnnnnnnnnnnnnnnnnnnnnnnnnnnnnnnnnnnnnnnnnnnnnnnnnnnnnnnnnnnnnnnnnnnnnnnnnnnnnnnnnnnnnnnnnnnnnnnnnnnnnnnnnnnnnnnnnnnnnnnnnnnnnnnnnnnnnnnnnnnnnnnnnnnnnnnnnnnnnnnnnnnnnnnnnnnnnnnnnnnnnnnnnnnnnnnnnnnnnnnnnnnnnnnnnnnnnnnnnnnnnnnnnnnnnnnnnnnnnnnnnnnnnnnnnnnnnnnnnnnnnnnnnnnnnnnnnnnnnnnnnnnnnnnnnnnnnnnnnnnnnnnnnnnnnnnnnnnnnnnnnnnnnnnnnnnnnnnnnnnnnnnnnnnnnnnnnnnnnnnnnnnnnnnnnnnnnnnnnnnnnnnnnnnnnnnnnnnnnnnnnnnnnnnnnnnnnnnnnnnnnnnnnnnnnnnnnnnnnnnnnnnnnnnnnnnnnnnnnnnnnnnnnnnnnnnnnnnnnnnnnnnnnnnnnnnnnnnnnnnnnnnnnnnnnnnnnnnnnnnnnnnnnnnnnnnnnnnnnnnnnnnnnnnnnnnnnnnnnnnnnnnnnnnnnnnnnnnnnnnnnnnnnnnnnnnnnnnnnnnnnnnnnnnnnnnnnnnnnnnnnnnnnnnnnnnnnnnnnnnnnnnnnnnnnnnnnnnnnnnnnnnnnnnnnnnnnnnnnnnnnnnnnnnnnnnnnnnnnnnnnnnnnnnnnnnnnnnnnnnnnnnnnnnnnnnnnnnnnnnnnnnnnnnnnnnnnnnnnnnnnnnnnnnnnnnnnnnnnnnnnnnnnnnnnnnnnnnnnnnnnnnnnnnnnnnnnnnnnnnnnnnnnnnnnnnnnnnnnnnnnnnnnnnnnnnnnnnnnnnnnnnnnnnnnnnnnnnnnnnnnnnnnnnnnnnnnnnnnnnnnnnnnnnnnnnnnnnnnnnnnnnnnnnnnnnnnnnnnnnnnnnnnnnnnnnnnnnnnnnnnnnnnnnnnnnnnnnnnnnnnnnnnnnnnnnnnnnnnnnnnnnnnnnnnnnnnnnnnnnnnnnnnnnnnnnnnnnnnnnnnnnnnnnnnnnnnnnnnnnnnnnnnnnnnnnnnnnnnnnnnnnnnnnnnnnnnnnnnnnnnnnnnnnnnnnnnnnnnnnnnnnnnnnnnnnnnnnnnnnnnnnnnnnnnnnnnnnnnnnnnnnnnnnnnnnnnnnnnnnnnnnnnnnnnnnnnnnnnnnnnnnnnnnnnnnnnnnnnnnnnnnnnnnnnnnnnnnnnnnnnnnnnnnnnnnnnnnnnnnnnnnnnnnnnnnnnnnnnnnnnnnnnnnnnnnnnnnnnnnnnnnnnnnnnnnnnnnnnnnnnnnnnnnnnnnnnnnnnnnnnnnnnnnnnnnnnnnnnnnnnnnnnnnnnnnnnnnnnnnnnnnnnnnnnnnnnnnnnnnnnnnnnnnnnnnnnnnnnnnnnnnnnnnnnnnnnnnnnnnnnnnnnnnnnnnnnnnnnnnnnnnnnnnnnnnnnnnnnnnnnnnnnnnnnnnnnnnnnnnnnnnnnnnnnnnnnnnnnnnnnnnnnnnnnnnnnnnnnnnnnnnnnnnnnnnnnnnnnnnnnnnnnnnnnnnnnnnnnnnnnnnnnnnnnnnnnnnnnnnnnnnnnnnnnnnnnnnnnnnnnnnnnnnnnnnnnnnnnnnnnnnnnnnnnnnnnnnnnnnnnnnnnnnnnnnnnnnnnnnnnnnnnnnnnnnnnnnnnnnnnnnnnnnnnnnnnnnnnnnnnnnnnnnnnnnnnnnnnnnnnnnnnnnnnnnnnnnnnnnnnnnnnnnnnnnnnnnnnnnnnnnnnnnnnnnnnnnnnnnnnnnnnnnnnnnnnnnnnnnnnnnnnnnnnnnnnnnnnnnnnnnnnnnnnnnnnnnnnnnnnnnnnnnnnnnnnnnnnnnnnnnnnnnnnnnnnnnnnnnnnnnnnnnnnnnnnnnnnnnnnnnnnnnnnnnnnnnnnnnnnnnnnnnnnnnnnnnnnnnnnnnnnnnnnnnnnnnnnnnnnnnnnnnnnnnnnnnnnnnnnnnnnnnnnnnnnnnnnnnnnnnnnnnnnnnnnnnnnnnnnnnnnnnnnnnnnnnnnnnnnnnnnnnnnnnnnnnnnnnnnnnnnnnnnnnnnnnnnnnnnnnnnnnnnnnnnnnnnnnnnnnnnnnnnnnnnnnnnnnnnnnnnnnnnnnnnnnnnnnnnnnnnnnnnnnnnnnnnnnnnnnnnnnnnnnnnnnnnnnnnnnnnnnnnnnnnnnnnnnnnnnnnnnnnnnnnnnnnnnnnnnnnnnnnnnnnnnnnnnnnnnnnnnnnnnnnnnnnnnnnnnnnnnnnnnnnnnnnnnnnnnnnnnnnnnnnnnnnnnnnnnnnnnnnnnnnnnnnnnnnnnnnnnnnnnnnnnnnnnnnnnnnnnnnnnnnnnnnnnnnnnnnnnnnnnnnnnnnnnnnnnnnnnnnnnnnnnnnnnnnnnnnnnnnnnnnnnnnnnnnnnnnnnnnnnnnnnnnnnnnnnnnnnnnnnnnnnnnnnnnnnnnnnnnnnnnnnnnnnnnnnnnnnnnnnnnnnnnnnnnnnnnnnnnnnnnnnnnnnnnnnnnnnnnnnnnnnnnnnnnnnnnnnnnnnnnnnnnnnnnnnnnnnnnnnnnnnnnnnnnnnnnnnnnnnnnnnnnnnnnnnnnnnnnnnnnnnnnnnnnnnnnnnnnnnnnnnnnnnnnnnnnnnnnnnnnnnnnnnnnnnnnnnnnnnnnnnnnnnnnnnnnnnnnnnnnnnnnnnnnnnnnnnnnnnnnnnnnnnnnnnnnnnnnnnnnnnnnnnnnnnnnnnnnnnnnnnnnnnnnnnnnnnnnnnnnnnnnnnnnnnnnnnnnnnnnnnnnnnnnnnnnnnnnnnnnnnnnnnnnnnnnnnnnnnnnnnnnnnnnnnnnnnnnnnnnnnnnnnnnnnnnnnnnnnnnnnnnnnnnnnnnnnnnnnnnnnnnnnnnnnnnnnnnnnnnnnnnnnnnnnnnnnnnnnnnnnnnnnnnnnnnnnnnnnnnnnnnnnnnnnnnnnnnnnnnnnnnnnnnnnnnnnnnnnnnnnnnnnnnnnnnnnnnnnnnnnnnnnnnnnnnnnnnnnnnnnnnnnnnnnnnnnnnnnnnnnnnnnnnnnnnnnnnnnnnnnnnnnnnnnnnnnnnnnnnnnnnnnnnnnnnnnnnnnnnnnnnnnnnnnnnnnnnnnnnnnnnnnnnnnnnnnnnnnnnnnnnnnnnnnnnnnnnnnnnnnnnnnnnnnnnnnnnnnnnnnnnnnnnnnnnnnnnnnnnnnnnnnnnnnnnnnnnnnnnnnnnnnnnnnnnnnnnnnnnnnnnnnnnnnnnnnnnnnnnnnnnnnnnnnnnnnnnnnnnnnnnnnnnnnnnnnnnnnnnnnnnnnnnnnnnnnnnnnnnnnnnnnnnnnnnnnnnnnnnnnnnnnnnnnnnnnnnnnnnnnnnnnnnnnnnnnnnnnnnnnnnnnnnnnnnnnnnnnnnnnnnnnnnnnnnnnnnnnnnnnnnnnnnnnnnnnnnnnnnnnnnnnnnnnnnnnnnnnnnnnnnnnnnnnnnnnnnnnnnnnnnnnnnnnnnnnnnnnnnnnnnnnnnnnnnnnnnnnnnnnnnnnnnnnnnnnnnnnnnnnnnnnnnnnnnnnnnnnnnnnnnnnnnnnnnnnnnnnnnnnnnnnnnnnnnnnnnnnnnnnnnnnnnnnnnnnnnnnnnnnnnnnnnnnnnnnnnnnnnnnnnnnnnnnnnnnnnnnnnnnnnnnnnnnnnnnnnnnnnnnnnnnnnnnnnnnnnnnnnnnnnnnnnnnnnnnnnnnnnnnnnnnnnnnnnnnnnnnnnnnnnnnnnnnnnnnnnnnnnnnnnnnnnnnnnnnnnnnnnnnnnnnnnnnnnnnnnnnnnnnnnnnnnnnnnnnnnnnnnnnnnnnnnnnnnnnnnnnnnnnnnnnnnnnnnnnnnnnnnnnnnnnnnnnnnnnnnnnnnnnnnnnnnnnnnnnnnnnnnnnnnnnnnnnnnnnnnnnnnnnnnnnnnnnnnnnnnnnnnnnnnnnnnnnnnnnnnnnnnnnnnnnnnnnnnnnnnnnnnnnnnnnnnnnnnnnnnnnnnnnnnnnnnnnnnnnnnnnnnnnnnnnnnnnnnnnnnnnnnnnnnnnnnnnnnnnnnnnnnnnnnnnnnnnnnnnnnnnnnnnnnnnnnnnnnnnnnnnnnnnnnnnnnnnnnnnnnnnnnnnnnnnnnnnnnnnnnnnnnnnnnnnnnnnnnnnnnnnnnnnnnnnnnnnnnnnnnnnnnnnnnnnnnnnnnnnnnnnnnnnnnnnnnnnnnnnnnnnnnnnnnnnnnnnnnnnnnnnnnnnnnnnnnnnnnnnnnnnnnnnnnnnnnnnnnnnnnnnnnnnnnnnnnnnnnnnnnnnnnnnnnnnnnnnnnnnnnnnnnnnnnnnnnnnnnnnnnnnnnnnnnnnnnnnnnnnnnnnnnnnnnnnnnnnnnnnnnnnnnnnnnnnnnnnnnnnnnnnnnnnnnnnnnnnnnnnnnnnnnnnnnnnnnnnnnnnnnnnnnnnnnnnnnnnnnnnnnnnnnnnnnnnnnnnnnnnnnnnnnnnnnnnnnnnnnnnnnnnnnnnnnnnnnnnnnnnnnnnnnnnnnnnnnnnnnnnnnnnnnnnnnnnnnnnnnnnnnnnnnnnnnnnnnnnnnnnnnnnnnnnnnnnnnnnnnnnnnnnnnnnnnnnnnnnnnnnnnnnnnnnnnnnnnnnnnnnnnnnnnnnnnnnnnnnnnnnnnnnnnnnnnnnnnnnnnnnnnnnnnnnnnnnnnnnnnnnnnnnnnnnnnnnnnnnnnnnnnnnnnnnnnnnnnnnnnnnnnnnnnnnnnnnnnnnnnnnnnnnnnnnnnnnnnnnnnnnnnnnnnnnnnnnnnnnnnnnnnnnnnnnnnnnnnnnnnnnnnnnnnnnnnnnnnnnnnnnnnnnnnnnnnnnnnnnnnnnnnnnnnnnnnnnnnnnnnnnnnnnnnnnnnnnnnnnnnnnnnnnnnnnnnnnnnnnnnnnnnnnnnnnnnnnnnnnnnnnnnnnnnnnnnnnnnnnnnnnnnnnnnnnnnnnnnnnnnnnnnnnnnnnnnnnnnnnnnnnnnnnnnnnnnnnnnnnnnnnnnnnnnnnnnnnnnnnnnnnnnnnnnnnnnnnnnnnnnnnnnnnnnnnnnnnnnnnnnnnnnnnnnnnnnnnnnnnnnnnnnnnnnnnnnnnnnnnnnnnnnnnnnnnnnnnnnnnnnnnnnnnnnnnnnnnnnnnnnnnnnnnnnnnnnnnnnnnnnnnnnnnnnnnnnnnnnnnnnnnnnnnnnnnnnnnnnnnnnnnnnnnnnnnnnnnnnnnnnnnnnnnnnnnnnnnnnnnnnnnnnnnnnnnnnnnnnnnnnnnnnnnnnnnnnnnnnnnnnnnnnnnnnnnnnnnnnnnnnnnnnnnnnnnnnnnnnnnnnnnnnnnnnnnnnnnnnnnnnnnnnnnnnnnnnnnnnnnnnnnnnnnnnnnnnnnnnnnnnnnnnnnnnnnnnnnnnnnnnnnnnnnnnnnnnnnnnnnnnnnnnnnnnnnnnnnnnnnnnnnnnnnnnnnnnnnnnnnnnnnnnnnnnnnnnnnnnnnnnnnnnnnnnnnnnnnnnnnnnnnnnnnnnnnnnnnnnnnnnnnnnnnnnnnnnnnnnnnnnnnnnnnnnnnnnnnnnnnnnnnnnnnnnnnnnnnnnnnnnnnnnnnnnnnnnnnnnnnnnnnnnnnnnnnnnnnnnnnnnnnnnnnnnnnnnnnnnnnnnnnnnnnnnnnnnnnnnnnnnnnnnnnnnnnnnnnnnnnnnnnnnnnnnnnnnnnnnnnnnnnnnnnnnnnnnnnnnnnnnnnnnnnnnnnnnnnnnnnnnnnnnnnnnnnnnnnnnnnnnnnnnnnnnnnnnnnnnnnnnnnnnnnnnnnnnnnnnnnnnnnnnnnnnnnnnnnnnnnnnnnnnnnnnnnnnnnnnnnnnnnnnnnnnnnnnnnnnnnnnnnnnnnnnnnnnnnnnnnnnnnnnnnnnnnnnnnnnnnnnnnnnnnnnnnnnnnnnnnnnnnnnnnnnnnnnnnnnnnnnnnnnnnnnnnnnnnnnnnnnnnnnnnnnnnnnnnnnnnnnnnnnnnnnnnnnnnnnnnnnnnnnnnnnnnnnnnnnnnnnnnnnnnnnnnnnnnnnnnnnnnnnnnnnnnnnnnnnnnnnnnnnnnnnnnnnnnnnnnnnnnnnnnnnnnnnnnnnnnnnnnnnnnnnnnnnnnnnnnnnnnnnnnnnnnnnnnnnnnnnnnnnnnnnnnnnnnnnnnnnnnnnnnnnnnnnnnnnnnnnnnnnnnnnnnnnnnnnnnnnnnnnnnnnnnnnnnnnnnnnnnnnnnnnnnnnnnnnnnnnnnnnnnnnnnnnnnnnnnnnnnnnnnnnnnnnnnnnnnnnnnnnnnnnnnnnnnnnnnnnnnnnnnnnnnnnnnnnnnnnnnnnnnnnnnnnnnnnnnnnnnnnnnnnnnnnnnnnnnnnnnnnnnnnnnnnnnnnnnnnnnnnnnnnnnnnnnnnnnnnnnnnnnnnnnnnnnnnnnnnnnnnnnnnnnnnnnnnnnnnnnnnnnnnnnnnnnnnnnnnnnnnnnnnnnnnnnnnnnnnnnnnnnnnnnnnnnnnnnnnnnnnnnnnnnnnnnnnnnnnnnnnnnnnnnnnnnnnnnnnnnnnnnnnnnnnnnnnnnnnnnnnnnnnnnnnnnnnnnnnnnnnnnnnnnnnnnnnnnnnnnnnnnnnnnnnnnnnnnnnnnnnnnnnnnnnnnnnnnnnnnnnnnnnnnnnnnnnnnnnnnnnnnnnnnnnnnnnnnnnnnnnnnnnnnnnnnnnnnnnnnnnnnnnnnnnnnnnnnnnnnnnnnnnnnctgtttctggttgcgaacctcatgtgccggcagttctaaaaacggcgaccggtaaggaaataaaatatatccgcaaggatgaggcccgcaggatgcttgccgtgctccagggacgagacaggctgattgttcagatgctctggcatacgggtctaaggacggcggagcttctttccataagggtttccgacatagactttgaacagaataccatcactgtcaggacgctgaagaagaaaatgaccctcccacgaaaggccaaagtgataaaggccgagatcagagttcttgagctggccctaaaggaaaatacacaggatgagactagtcgagaccggctggctgctataagagcatgtctggccgcgtttgagaggcagcctcccgctctacggttcaggactatacctgtttactcccctctcaccgagcagatagcctcttatgccaaggccaagggcctcgataaggactatcctctgttcaccgtaagtcgcatgacggtctatcggatcgtgcgcaaggccggggcaagggccgggctggattctgaccgggccaatccgcaggccttcagacacggctttgccatcaatgcagtcctggcaggagttccgccgctcctgctgcaacagtggctgggacatgtgtccgtaaggacaaccctcgtctatactgaggccctcagacgggataccaaggactatctgcttaggatggcgttttgaggtcgagctatgtttttgaggaaagccagctttgttttgttgtttcttttgtgggcatccgccgccttttccggggagcctgattccgccggaggcatagacattggctcatttctttcgggcgttttctccggccagatggagctgctggatattcgcagccgacaggaatacacccttttacacgcaggcttcggtctgcatatccctgccagcgagcttcccgacaggctgtcggaattgccgactggcaagatactggtcgtcgtctgccacacccatacccgatcgcctcgtgtcgccgcctttctcgggcagaaaggcttccgcgccgtgtggcttcaaaatggccttgtaggtctggctcactttttcactagcgcgaatgcggagcagctcggaacagccctgggctacgcggaaccccgcaagggtgtccagaagatcatcgagcgtcatcgtcaggaattacagccatttacatccgtcgtcaatttgacgacaccttcttcgcccagcgacaacaggggcggaggcccgcagcagaccaccatcattgacacggacggccagtacatgatcgcgctcctggcaaacacgcccaaggccgccgacttccgaatcttcgtggtcggcatgttgaaggccctggagcgccgggaattcattcccctctcacaggccctcgcctggcaggaagagcagtcccggcttttcgattacctcgccctgtccaaatccgtcaacctccgcaaatacagaaatttcctccgctaccgcgacatgggcctctcccagagggagatcgggaagctcctggacgtgagcgaattcaagatgtcgggcaataaggagatttcaggacgagaggtagatgcagttcagtcagagggtccacattaagatgacaaacgaggaaataggcagactcttaaacaacgcagtgccgcacatgaaggggaattcgaaacaccgcgatcccactgtcgacttgcggttgtgaaatccacagcaaaaagggaaaggaggaaaaatatatggtccttcctgtaacacaagggacttacaacctgcttgaagaaaagtggatacctgtgctctactgtgatgggaagacagatcacgtcggtatctacaaggcgctgtcagacgcccgcaggatcaggcagatagccgccagcaatcctatggacagggtggcgatactgcgctttctgttggccctgcttttttggtgtatacgcaacgagaagttttcacttgcggacttggacgagaaaagtgccgacataccggagaactggcttgctaagctgaaggaaaacaggtccgcgttcaatctgctgggcgacagtaaaagattctaccaggacgaattgttgaagggcaaggaatctcggcccatcggcgatctgctcgtcgagttccctggagcggattcggtgaatcacatgcgccacgttgtgcatgacggttcctacgggttttgccccgcgtgttgcgcaatgggaatcttgcaactctcggtctgggctccggccaacaggttttatcctgcatcagtcaacccgggctctgcggcctacgcattcattgaagggaagaacctgttccaaaccctttgcacgaaacttccagaaacaaatccgcaagctgatcaggctccatggttgggcaacaaggagccgaattcacctgatgcagtaaccatgcttgcctggcggcctcgcaagttgtggttgaatgttggacgtgaaaatggccattgtgcgaactgcggcagtttcggcgagctgataaccagcctgtgcaacgaaggcggttggccgacaccaacaacaagcagccaggagtttgctaaggcggttgaaacagagttcaagaatctcggctacagagcgaaagacaaagcaaataggaacgccaaaaaggtcgtgaagatggcatcactcattcgcaaatgcaggatggatgatttgcgcaaggcatgtagacagagcaatccaaagccccaagcggcggctccaacgacgcagaaggatgagcaagaaatcgctctgttgtttcatcagttgattttgaagaacgacaaaagcgcgcaaaaggcgatcaagtctctcactgaggaaccaaatgaggaggaacagaaggcgttagaggatggagacatgcgggcaaagaagttctgggacgctgatccccatctgctgagggatggcgagcccatatccctgcccggattgggggcggatgtggccatgcactcttcacagttttggcgcgacgcactccgtttgcagcgagggcaggttggaagggtcacggccatcggtccggtcgtcaacaagttcacgttccaggatggcgtttccatatctttgccggaagcctctgacgatgtcaaacgccgagccaatctgtctgccgactgcggcggcgagttgcgagacctgcttaagcaggtgacgcaaaatcccctccggcagcaccccgaaattggcgcatccgtcaagcttctgacgccaaatgccgaggctcagattcgtgaccggctgagccggaccaatgcctcgccgggcgataatgcaaccaaagacaaggcattcctgcgtgaagtctatgcgccggtggtggagcaggttatcgcttctgtaacacctggctccccgctccgtcggcgtgccgcgcgtaatcacacccaagccctgctgaacaaaaagatcaaagagctggtggacaatccggatcatctgtcggaagcaggtatgcatgcagcagtgccttgcaaagcgaaacgcggccgcaagaagggaggatcaaaatgagccagaccgctgaatacatcaagaggctttcagatatgcaagaaggggaactctcggtgctgcgccgtctggccggacggacgctcgatgccacgcttcagggttttgacctcttcacgggtctttggtggccattacgggcgaaaagtcagaactgcccgcgccgggagccgtcatggctcgttgctaagcttttcggggccttccgcattccgcatatccggcccgattcaggcgctggtccccttttgcccgaggtcctgggccgctgcgaaccgaatggcaaggctgacatagagtgtttccgaacacgattcgacagtctgctttgttcatccttgtcgtctctggagccgcatttgcggtgggcgctgggagagatcgcacgggccgtcgccgggcatgtgcctcatgcgcgggatgtgaagggcatcgactgggcgcaactcctcgatgatctctctatctggggccggggtgaggagcaccgccgcggacgcgatgttcgcgacatctgggccgaaacgtatcttaacgctactaacttccatgcccatgtagggcacaacgaaagatgaaaatggtcaataggttggaagtattttcatataaattcaaaagagaggagagcatagaaatgttgatcgaaatccacatgatccagaatcacagcccggcaaacctgaaccgggacgatcttggtgtgcccaagacctgcatcttcggtggcgtaacccgggcgcgcatctccagccagtgtctcaaacgcagtatccgccgcagcccggagtttgcggccgctttggacagggaaggtggtatccgcacgcgccgattggcgaatgtgctggcccgtgtcgcctatgctggagacttcgacatgactcccgaaaagttgaccaatcttctccaagcacaacccgtcgagaacgaagagatcaacagactcgatgccattgcttcggacgccttgcaactgggcggggtgaaggcgaaaagcaagaagaagagcaaaagcgacgaagagaatgaaggcaacggtgatgatacgagcgccgaggcacattccaagatgcttctcttcctctctacgaacacaatcgggaagatggcaaaagacctgaaggacaaaccgacggcaaaggggcttgccgagaaattcaagaaatacattgccgaaaaccccgccgcccccgacatcgccctgaatgggcgcatgactgaggttgcaaagaaaagtgtcttcagtgatttgaactttacggtcgaggctgcgctctccgctgcccacgccatttcaactcacgcggtcataaacgaggtagactatttcaccgctgccgacgaccttcccggacctgatgcaggtgcggctcatgtcaacgagactatgttcaactccgcctgcttctacaaacattttataattgattttaaacagttgaagaagaatttgagaaatgatggagaacttgcacgcaagacggtgcaatgtttccttgaagcagccgccaaagccaatccctcaggcaaacagcacgcatttgcggcattcaatttacccgacggagttctggtcgaggtcaaaaccaagtcagccactccggtcagctatgccaacgcctttgccgatccggtaccggaaagagccgaacgcgctttgatcggtgaaagcattgccagacttggtcagtatgtccacgacatcattacgggttacggcatcgaggctgaccgtttctggttctctcctaacctgcttcaccccctgacttggattgacaaaagcagaaaggaacacgagcaagaacaatccgtcgtcggtaccaatgagttcggccagttcggcatgtttgtccagagggtcatggagaaggtcgtatcagccgaaaagtcggcggaggacgcggaatgaaagaagccaaaacactcttccttcgtcttgaaggactccttcaggcctggggcgacacctccaagttcgtcctccggcggaccatggaggcgccgaccaaatccggcgtgctgggccttatctgctgcgccatgggcctgtcgcgtcaggcggcccgggaacgcctgccggagctcaatacacttgcgatgggtgtgcgaatagatcggcccggcatacgttggtgggactaccacacggtaggagcagaagtcggcctggcaaccgccgggggcaatgttaaaaccggtgctcagggcacgctcatcacgcgtcgagaatacctgaccgacgccagttttttagtggcgcttcaaggtgatccggacctgatctctgatgtcacagaggcgattgaatctccgaagcggcctgtctttcttggccgcaggtcctgtccgccgtcggtgccgatactcgaaagacccggtgagggcgaagggtggaaaaatcctgacgactacggcgacctgacctccgcgctgaactccgtcccgtggcatccgctgtgcgccgatgataaaacgccgcagaaagggacggtccaaactattttggaatggcggccagcctcggaaggagacatcgcctctgaagaggcggaagtatggtacgacgtggcggtttgcttcgacccgccggtccacatgccccggtttgtcctacggagcagtgtctcgccagtagtcggcaaagcgttgcaggaatttccccatgcaccgccgcggccacgcgcagactataggaactctgaatatcgccagcgccgcgaagagcgattaaggaaggactccggggtgtgcgtcttctgtaagtcgcccggtcctcgcatgaccgtccaacatgtgacataccgaagggcagggggaaacgaaacccttgaggatcttcggtctctttgcggtctatgccatgatgccgtcaccatgctcgaatatggaatgaatatggggctggaccgcatcaacccagaggacattcgctggcgggatctgataatccaaaagcgggccgatataatcaaattccggtcgcttgcagccagacgccgttatctttctgccgaggaggtggaatgatgtactgttcgagactgctcattgatacaggcacaaaccccgaccgtccgcggcccggtcgattgtggttgaggaaccgctatcacgtccaccagcggctttgtatggcctttccatccacatcacgaaaggccgaagatccggacttcctcaaaccattcaattcggctgcgtttggtaacggtcaagtccacgtgaagcgcgccatggatgtaggatttcttttccgcattgaccctcttcccaacggccgggcgttgatcatagtgcagtctgctctaacgcccgactggggctatgcttttcacaatgcgagccatcttctggcagcccccccagaggtggaaccattcgagccgaatttttcgaagggtcagttccttcgcttccgtctgtcggcaaatccgaccagacgtttgagcaagcattcacccgatgcaaaagacaactctatcgggaagcgcgttcctgttccggccgacaaacttattgactggcttgtccgtcaggcgggctcggcaggattcctagtaaggcgggacgttacaacttttacgccagggtatgtctatattagcaaaaatggcaagggccagcgtctattctcggttctttacaacggcctccttcaggtcattgacccagatgcctttcggcagacatttgtcagcggtatcggttcaggtaaagccttcggtttcgggctcctttcggttgcaccgggtaatagtgaaggcttaggacacacagtatgagagttcaggacttgcacgttttgcccaagttcagcgacgggtggagctacctctacgtcgagcattgccgcgtcgaccaggaagaccgcgccatcgccatccacgacaaatccggcaaggtgcctgtcccctgcgccaatctggcgctgctcatgctgggcccgggcgtctcaattacgcatgccgcaatctctgtgcttgccgaccatgggtgcctggtcacctggtgcggcgaagagggaatccggttttacgcggttggaatgggtgagacacggagcgcagcgaactttctccatcaagcgcgggcttgggccgatgtggattttcgtctgaaggtcgtgcgctgtttgtatgagatgcggtttgccgaaacgtttgatccggagctgaccctgcaacagatccgcggtatggaaggcgtgcgtgtccgggatgcttatgccagtgccgccaaggaaaccggcgtgccatggtcaggtcgcagctaccggcgtgacaaggggaacgatgcagatccggttaacagggccttgtcggcggccaattcatgtctttacggcatctgccatgccgctattgtctcaagcggattctcgccagcgctcgggttcatccatacgggcaagatgttatccttcgtttatgatatcgccgacctttacaaggcagaaacaactattccagcggcatttcgtgctgccgcagaagataaagaggggctggaacgacgtgtacgagtcatgtgccgcgacctttttgtatcaacccgacttctggagagaatcattcctgacatacaaaacgctctaatgttgccgaagaaaagagcgaccggtgagcagaccttcgaccaggacgcagcccttccaggctcgttgtgggaccctgcgacaggagaagtgcagggcgggtacgcctatccgttggaaacagatgaaatggagtctaacgatggtggttctgattcttgagcgtgtgccgcctgggttacggggtgaattgacaaggtggtttctggaaccgaaagcgggtgtctttgtgggtagggtttcagccatggtacgcgaaagactttgggagaaagcctgcgaccaatccaagggaggaggatgtttgatgattcattcgagcgacaatgagcagggttttcggtttcgtagttggggagagatggcgcggtcggtcgaagacttcgaagggctttttcttgtccgtgtgccgtaattacaggctttttttagtattgtccccacgcacgtgggggtgaaccggacggctcagaagtaagcctgagctttgacacattgtccccacgcacgtgggggtgaaccggaatgcctgtttcaaatggttctcggcctcggcattgtccccacgcac

SEQ ID NO: 1073 - DNA, 103259 bp, Artificial Sequence; identical to SEQ ID NO: 1072
  Synthetic Oligonucleotide
  misc_feature (1)..(94535): n is a, c, g, or t

SEQ ID NO: 1074 - DNA, 104300 bp, Artificial Sequence
  Synthetic Oligonucleotide
  misc_feature (1)..(95584): n is a, c, g, or t
nnnnnnnnnnnnnnnnnnnnnnnnnnnnnnnnnnnnnnnnnnnnnnnnnnnnnnnnnnnnnnnnnnnnnnnnnnnnnnnnnnnnnnnnnnnnnnnnnnnnnnnnnnnnnnnnnnnnnnnnnnnnnnnnnnnnnnnnnnnnnnnnnnnnnnnnnnnnnnnnnnnnnnnnnnnnnnnnnnnnnnnnnnnnnnnnnnnnnnnnnnnnnnnnnnnnnnnnnnnnnnnnnnnnnnnnnnnnnnnnnnnnnnnnnnnnnnnnnnnnnnnnnnnnnnnnnnnnnnnnnnnnnnnnnnnnnnnnnnnnnnnnnnnnnnnnnnnnnnnnnnnnnnnnnnnnnnnnnnnnnnnnnnnnnnnnnnnnnnnnnnnnnnnnnnnnnnnnnnnnnnnnnnnnnnnnnnnnnnnnnnnnnnnnnnnnnnnnnnnnnnnnnnnnnnnnnnnnnnnnnnnnnnnnnnnnnnnnnnnnnnnnnnnnnnnnnnnnnnnnnnnnnnnnnnnnnnnnnnnnnnnnnnnnnnnnnnnnnnnnnnnnnnnnnnnnnnnnnnnnnnnnnnnnnnnnnnnnnnnnnnnnnnnnnnnnnnnnnnnnnnnnnnnnnnnnnnnnnnnnnnnnnnnnnnnnnnnnnnnnnnnnnnnnnnnnnnnnnnnnnnnnnnnnnnnnnnnnnnnnnnnnnnnnnnnnnnnnnnnnnnnnnnnnnnnnnnnnnnnnnnnnnnnnnnnnnnnnnnnnnnnnnnnnnnnnnnnnnnnnnnnnnnnnnnnnnnnnnnnnnnnnnnnnnnnnnnnnnnnnnnnnnnnnnnnnnnnnnnnnnnnnnnnnnnnnnnnnnnnnnnnnnnnnnnnnnnnnnnnnnnnnnnnnnnnnnnnnnnnnnnnnnnnnnnnnnnnnnnnnnnnnnnnnnnnnnnnnnnnnnnnnnnnnnnnnnnnnnnnnnnnnnnnnnnnnnnnnnnnnnnnnnnnnnnnnnnnnnnnnnnnnnnnnnnnnnnnnnnnnnnnnnnnnnnnnnnnnnnnnnnnnnnnnnnnnnnnnnnnnnnnnnnnnnnnnnnnnnnnnnnnnnnnnnnnnnnnnnnnnnnnnnnnnnnnnnnnnnnnnnnnnnnnnnnnnnnnnnnnnnnnnnnnnnnnnnnnnnnnnnnnnnnnnnnnnnnnnnnnnnnnnnnnnnnnnnnnnnnnnnnnnnnnnnnnnnnnnnnnnnnnnnnnnnnnnnnnnnnnnnnnnnnnnnnnnnnnnnnnnnnnnnnnnnnnnnnnnnnnnnnnnnnnnnnnnnnnnnnnnnnnnnnnnnnnnnnnnnnnnnnnnnnnnnnnnnnnnnnnnnnnnnnnnnnnnnnnnnnnnnnnnnnnnnnnnnnnnnnnnnnnnnnnnnnnnnnnnnnnnnnnnnnnnnnnnnnnnnnnnnnnnnnnnnnnnnnnnnnnnnnnnnnnnnnnnnnnnnnnnnnnnnnnnnnnnnnnnnnnnnnnnnnnnnnnnnnnnnnnnnnnnnnnnnnnnnnnnnnnnnnnnnnnnnnnnnnnnnnnnnnnnnnnnnnnnnnnnnnnnnnnnnnnnnnnnnnnnnnnnnnnnnnnnnnnnnnnnnnnnnnnnnnnnnnnnnnnnnnnnnnnnnnnnnnnnnnnnnnnnnnnnnnnnnnnnnnnnnnnnnnnnnnnnnnnnnnnnnnnnnnnnnnnnnnnnnnnnnnnnnnnnnnnnnnnnnnnnnnnnnnnnnnnnnnnnnnnnnnnnnnnnnnnnnnnnnnnnnnnnnnnnnnnnnnnnnnnnnnnnnnnnnnnnnnnnnnnnnnnnnnnnnnnnnnnnnnnnnnnnnnnnnnnnnnnnnnnnnnnnnnnnnnnnnnnnnnnnnnnnnnnnnnnnnnnnnnnnnnnnnnnnnnnnnnnnnnnnnnnnnnnnnnnnnnnnnnnnnnnnnnnnnnnnnnnnnnnnnnnnnnnnnnnnnnnnnnnnnnnnnnnnnnnnnnnnnnnnnnnnnnnnnnnnnnnnnnnnnnnnnnnnnnnnnnnnnnnnnnnnnnnnnnnnnnnnnnnnnnnnnnnnnnnnnnnnnnnnnnnnnnnnnnnnnnnnnnnnnnnnnnnnnnnnnnnnnnnnnnnnnnnnnnnnnnnnnnnnnnnnnnnnnnnnnnnnnnnnnnnnnnnnnnnnnnnnnnnnnnnnnnnnnnnnnnnnnnnnnnnnnnnnnnnnnnnnnnnnnnnnnnnnnnnnnnnnnnnnnnnnnnnnnnnnnnnnnnnnnnnnnnnnnnnnnnnnnnnnnnnnnnnnnnnnnnnnnnnnnnnnnnnnnnnnnnnnnnnnnnnnnnnnnnnnnnnnnnnnnnnnnnnnnnnnnnnnnnnnnnnnnnnnnnnnnnnnnnnnnnnnnnnnnnnnnnnnnnnnnnnnnnnnnnnnnnnnnnnnnnnnnnnnnnnnnnnnnnnnnnnnnnnnnnnnnnnnnnnnnnnnnnnnnnnnnnnnnnnnnnnnnnnnnnnnnnnnnnnnnnnnnnnnnnnnnnnnnnnnnnnnnnnnnnnnnnnnnnnnnnnnnnnnnnnnnnnnnnnnnnnnnnnnnnnnnnnnnnnnnnnnnnnnnnnnnnnnnnnnnnnnnnnnnnnnnnnnnnnnnnnnnnnnnnnnnnnnnnnnnnnnnnnnnnnnnnnnnnnnnnnnnnnnnnnnnnnnnnnnnnnnnnnnnnnnnnnnnnnnnnnnnnnnnnnnnnnnnnnnnnnnnnnnnnnnnnnnnnnnnnnnnnnnnnnnnnnnnnnnnnnnnnnnnnnnnnnnnnnnnnnnnnnnnnnnnnnnnnnnnnnnnnnnnnnnnnnnnnnnnnnnnnnnnnnnnnnnnnnnnnnnnnnnnnnnnnnnnnnnnnnnnnnnnnnnnnnnnnnnnnnnnnnnnnnnnnnnnnnnnnnnnnnnnnnnnnnnnnnnnnnnnnnnnnnnnnnnnnnnnnnnnnnnnnnnnnnnnnnnnnnnnnnnnnnnnnnnnnnnnnnnnnnnnnnnnnnnnnnnnnnnnnnnnnnnnnnnnnnnnnnnnnnnnnnnnnnnnnnnnnnnnnnnnnnnnnnnnnnnnnnnnnnnnnnnnnnnnnnnnnnnnnnnnnnnnnnnnnnnnnnnnnnnnnnnnnnnnnnnnnnnnnnnnnnnnnnnnnnnnnnnnnnnnnnnnnnnnnnnnnnnnnnnnnnnnnnnnnnnnnnnnnnnnnnnnnnnnnnnnnnnnnnnnnnnnnnnnnnnnnnnnnnnnnnnnnnnnnnnnnnnnnnnnnnnnnnnnnnnnnnnnnnnnnnnnnnnnnnnnnnnnnnnnnnnnnnnnnnnnnnnnnnnnnnnnnnnnnnnnnnnnnnnnnnnnnnnnnnnnnnnnnnnnnnnnnnnnnnnnnnnnnnnnnnnnnnnnnnnnnnnnnnnnnnnnnnnnnnnnnnnnnnnnnnnnnnnnnnnnnnnnnnnnnnnnnnnnnnnnnnnnnnnnnnnnnnnnnnnnnnnnnnnnnnnnnnnnnnnnnnnnnnnnnnnnnnnnnnnnnnnnnnnnnnnnnnnnnnnnnnnnnnnnnnnnnnnnnnnnnnnnnnnnnnnnnnnnnnnnnnnnnnnnnnnnnnnnnnnnnnnnnnnnnnnnnnnnnnnnnnnnnnnnnnnnnnnnnnnnnnnnnnnnnnnnnnnnnnnnnnnnnnnnnnnnnnnnnnnnnnnnnnnnnnnnnnnnnnnnnnnnnnnnnnnnnnnnnnnnnnnnnnnnnnnnnnnnnnnnnnnnnnnnnnnnnnnnnnnnnnnnnnnnnnnnnnnnnnnnnnnnnnnnnnnnnnnnnnnnnnnnnnnnnnnnnnnnnnnnnnnnnnnnnnnnnnnnnnnnnnnnnnnnnnnnnnnnnnnnnnnnnnnnnnnnnnnnnnnnnnnnnnnnnnnnnnnnnnnnnnnnnnnnnnnnnnnnnnnnnnnnnnnnnnnnnnnnnnnnnnnnnnnnnnnnnnnnnnnnnnnnnnnnnnnnnnnnnnnnnnnnnnnnnnnnnnnnnnnnnnnnnnnnnnnnnnnnnnnnnnnnnnnnnnnnnnnnnnnnnnnnnnnnnnnnnnnnnnnnnnnnnnnnnnnnnnnnnnnnnnnnnnnnnnnnnnnnnnnnnnnnnnnnnnnnnnnnnnnnnnnnnnnnnnnnnnnnnnnnnnnnnnnnnnnnnnnnnnnnnnnnnnnnnnnnnnnnnnnnnnnnnnnnnnnnnnnnnnnnnnnnnnnnnnnnnnnnnnnnnnnnnnnnnnnnnnnnnnnnnnnnnnnnnnnnnnnnnnnnnnnnnnnnnnnnnnnnnnnnnnnnnnnnnnnnnnnnnnnnnnnnnnnnnnnnnnnnnnnnnnnnnnnnnnnnnnnnnnnnnnnnnnnnnnnnnnnnnnnnnnnnnnnnnnnnnnnnnnnnnnnnnnnnnnnnnnnnnnnnnnnnnnnnnnnnnnnnnnnnnnnnnnnnnnnnnnnnnnnnnnnnnnnnnnnnnnnnnnnnnnnnnnnnnnnnnnnnnnnnnnnnnnnnnnnnnnnnnnnnnnnnnnnnnnnnnnnnnnnnnnnnnnnnnnnnnnnnnnnnnnnnnnnnnnnnnnnnnnnnnnnnnnnnnnnnnnnnnnnnnnnnnnnnnnnnnnnnnnnnnnnnnnnnnnnnnnnnnnnnnnnnnnnnnnnnnnnnnnnnnnnnnnnnnnnnnnnnnnnnnnnnnnnnnnnnnnnnnnnnnnnnnnnnnnnnnnnnnnnnnnnnnnnnnnnnnnnnnnnnnnnnnnnnnnnnnnnnnnnnnnnnnnnnnnnnnnnnnnnnnnnnnnnnnnnnnnnnnnnnnnnnnnnnnnnnnnnnnnnnnnnnnnnnnnnnnnnnnnnnnnnnnnnnnnnnnnnnnnnnnnnnnnnnnnnnnnnnnnnnnnnnnnnnnnnnnnnnnnnnnnnnnnnnnnnnnnnnnnnnnnnnnnnnnnnnnnnnnnnnnnnnnnnnnnnnnnnnnnnnnnnnnnnnnnnnnnnnnnnnnnnnnnnnnnnnnnnnnnnnnnnnnnnnnnnnnnnnnnnnnnnnnnnnnnnnnnnnnnnnnnnnnnnnnnnnnnnnnnnnnnnnnnnnnnnnnnnnnnnnnnnnnnnnnnnnnnnnnnnnnnnnnnnnnnnnnnnnnnnnnnnnnnnnnnnnnnnnnnnnnnnnnnnnnnnnnnnnnnnnnnnnnnnnnnnnnnnnnnnnnnnnnnnnnnnnnnnnnnnnnnnnnnnnnnnnnnnnnnnnnnnnnnnnnnnnnnnnnnnnnnnnnnnnnnnnnnnnnnnnnnnnnnnnnnnnnnnnnnnnnnnnnnnnnnnnnnnnnnnnnnnnnnnnnnnnnnnnnnnnnnnnnnnnnnnnnnnnnnnnnnnnnnnnnnnnnnnnnnnnnnnnnnnnnnnnnnnnnnnnnnnnnnnnnnnnnnnnnnnnnnnnnnnnnnnnnnnnnnnnnnnnnnnnnnnnnnnnnnnnnnnnnnnnnnnnnnnnnnnnnnnnnnnnnnnnnnnnnnnnnnnnnnnnnnnnnnnnnnnnnnnnnnnnnnnnnnnnnnnnnnnnnnnnnnnnnnnnnnnnnnnnnnnnnnnnnnnnnnnnnnnnnnnnnnnnnnnnnnnnnnnnnnnnnnnnnnnnnnnnnnnnnnnnnnnnnnnnnnnnnnnnnnnnnnnnnnnnnnnnnnnnnnnnnnnnnnnnnnnnnnnnnnnnnnnnnnnnnnnnnnnnnnnnnnnnnnnnnnnnnnnnnnnnnnnnnnnnnnnnnnnnnnnnnnnnnnnnnnnnnnnnnnnnnnnnnnnnnnnnnnnnnnnnnnnnnnnnnnnnnnnnnnnnnnnnnnnnnnnnnnnnnnnnnnnnnnnnnnnnnnnnnnnnnnnnnnnnnnnnnnnnnnnnnnnnnnnnnnnnnnnnnnnnnnnnnnnnnnnnnnnnnnnnnnnnnnnnnnnnnnnnnnnnnnnnnnnnnnnnnnnnnnnnnnnnnnnnnnnnnnnnnnnnnnnnnnnnnnnnnnnnnnnnnnnnnnnnnnnnnnnnnnnnnnnnnnnnnnnnnnnnnnnnnnnnnnnnnnnnnnnnnnnnnnnnnnnnnnnnnnnnnnnnnnnnnnnnnnnnnnnnnnnnnnnnnnnnnnnnnnnnnnnnnnnnnnnnnnnnnnnnnnnnnnnnnnnnnnnnnnnnnnnnnnnnnnnnnnnnnnnnnnnnnnnnnnnnnnnnnnnnnnnnnnnnnnnnnnnnnnnnnnnnnnnnnnnnnnnnnnnnnnnnnnnnnnnnnnnnnnnnnnnnnnnnnnnnnnnnnnnnnnnnnnnnnnnnnnnnnnnnnnnnnnnnnnnnnnnnnnnnnnnnnnnnnnnnnnnnnnnnnnnnnnnnnnnnnnnnnnnnnnnnnnnnnnnnnnnnnnnnnnnnnnnnnnnnnnnnnnnnnnnnnnnnnnnnnnnnnnnnnnnnnnnnnnnnnnnnnnnnnnnnnnnnnnnnnnnnnnnnnnnnnnnnnnnnnnnnnnnnnnnnnnnnnnnnnnnnnnnnnnnnnnnnnnnnnnnnnnnnnnnnnnnnnnnnnnnnnnnnnnnnnnnnnnnnnnnnnnnnnnnnnnnnnnnnnnnnnnnnnnnnnnnnnnnnnnnnnnnnnnnnnnnnnnnnnnnnnnnnnnnnnnnnnnnnnnnnnnnnnnnnnnnnnnnnnnnnnnnnnnnnnnnnnnnnnnnnnnnnnnnnnnnnnnnnnnnnnnnnnnnnnnnnnnnnnnnnnnnnnnnnnnnnnnnnnnnnnnnnnnnnnnnnnnnnnnnnnnnnnnnnnnnnnnnnnnnnnnnnnnnnnnnnnnnnnnnnnnnnnnnnnnnnnnnnnnnnnnnnnnnnnnnnnnnnnnnnnnnnnnnnnnnnnnnnnnnnnnnnnnnnnnnnnnnnnnnnnnnnnnnnnnnnnnnnnnnnnnnnnnnnnnnnnnnnnnnnnnnnnnnnnnnnnnnnnnnnnnnnnnnnnnnnnnnnnnnnnnnnnnnnnnnnnnnnnnnnnnnnnnnnnnnnnnnnnnnnnnnnnnnnnnnnnnnnnnnnnnnnnnnnnnnnnnnnnnnnnnnnnnnnnnnnnnnnnnnnnnnnnnnnnnnnnnnnnnnnnnnnnnnnnnnnnnnnnnnnnnnnnnnnnnnnnnnnnnnnnnnnnnnnnnnnnnnnnnnnnnnnnnnnnnnnnnnnnnnnnnnnnnnnnnnnnnnnnnnnnnnnnnnnnnnnnnnnnnnnnnnnnnnnnnnnnnnnnnnnnnnnnnnnnnnnnnnnnnnnnnnnnnnnnnnnnnnnnnnnnnnnnnnnnnnnnnnnnnnnnnnnnnnnnnnnnnnnnnnnnnnnnnnnnnnnnnnnnnnnnnnnnnnnnnnnnnnnnnnnnnnnnnnnnnnnnnnnnnnnnnnnnnnnnnnnnnnnnnnnnnnnnnnnnnnnnnnnnnnnnnnnnnnnnnnnnnnnnnnnnnnnnnnnnnnnnnnnnnnnnnnnnnnnnnnnnnnnnnnnnnnnnnnnnnnnnnnnnnnnnnnnnnnnnnnnnnnnnnnnnnnnnnnnnnnnnnnnnnnnnnnnnnnnnnnnnnnnnnnnnnnnnnnnnnnnnnnnnnnnnnnnnnnnnnnnnnnnnnnnnnnnnnnnnnnnnnnnnnnnnnnnnnnnnnnnnnnnnnnnnnnnnnnnnnnnnnnnnnnnnnnnnnnnnnnnnnnnnnnnnnnnnnnnnnnnnnnnnnnnnnnnnnnnnnnnnnnnnnnnnnnnnnnnnnnnnnnnnnnnnnnnnnnnnnnnnnnnnnnnnnnnnnnnnnnnnnnnnnnnnnnnnnnnnnnnnnnnnnnnnnnnnnnnnnnnnnnnnnnnnnnnnnnnnnnnnnnnnnnnnnnnnnnnnnnnnnnnnnnnnnnnnnnnnnnnnnnnnnnnnnnnnnnnnnnnnnnnnnnnnnnnnnnnnnnnnnnnnnnnnnnnnnnnnnnnnnnnnnnnnnnnnnnnnnnnnnnnnnnnnnnnnnnnnnnnnnnnnnnnnnnnnnnnnnnnnnnnnnnnnnnnnnnnnnnnnnnnnnnnnnnnnnnnnnnnnnnnnnnnnnnnnnnnnnnnnnnnnnnnnnnnnnnnnnnnnnnnnnnnnnnnnnnnnnnnnnnnnnnnnnnnnnnnnnnnnnnnnnnnnnnnnnnnnnnnnnnnnnnnnnnnnnnnnnnnnnnnnnnnnnnnnnnnnnnnnnnnnnnnnnnnnnnnnnnnnnnnnnnnnnnnnnnnnnnnnnnnnnnnnnnnnnnnnnnnnnnnnnnnnnnnnnnnnnnnnnnnnnnnnnnnnnnnnnnnnnnnnnnnnnnnnnnnnnnnnnnnnnnnnnnnnnnnnnnnnnnnnnnnnnnnnnnnnnnnnnnnnnnnnnnnnnnnnnnnnnnnnnnnnnnnnnnnnnnnnnnnnnnnnnnnnnnnnnnnnnnnnnnnnnnnnnnnnnnnnnnnnnnnnnnnnnnnnnnnnnnnnnnnnnnnnnnnnnnnnnnnnnnnnnnnnnnnnnnnnnnnnnnnnnnnnnnnnnnnnnnnnnnnnnnnnnnnnnnnnnnnnnnnnnnnnnnnnnnnnnnnnnnnnnnnnnnnnnnnnnnnnnnnnnnnnnnnnnnnnnnnnnnnnnnnnnnnnnnnnnnnnnnnnnnnnnnnnnnnnnnnnnnnnnnnnnnnnnnnnnnnnnnnnnnnnnnnnnnnnnnnnnnnnnnnnnnnnnnnnnnnnnnnnnnnnnnnnnnnnnnnnnnnnnnnnnnnnnnnnnnnnnnnnnnnnnnnnnnnnnnnnnnnnnnnnnnnnnnnnnnnnnnnnnnnnnnnnnnnnnnnnnnnnnnnnnnnnnnnnnnnnnnnnnnnnnnnnnnnnnnnnnnnnnnnnnnnnnnnnnnnnnnnnnnnnnnnnnnnnnnnnnnnnnnnnnnnnnnnnnnnnnnnnnnnnnnnnnnnnnnnnnnnnnnnnnnnnnnnnnnnnnnnnnnnnnnnnnnnnnnnnnnnnnnnnnnnnnnnnnnnnnnnnnnnnnnnnnnnnnnnnnnnnnnnnnnnnnnnnnnnnnnnnnnnnnnnnnnnnnnnnnnnnnnnnnnnnnnnnnnnnnnnnnnnnnnnnnnnnnnnnnnnnnnnnnnnnnnnnnnnnnnnnnnnnnnnnnnnnnnnnnnnnnnnnnnnnnnnnnnnnnnnnnnnnnnnnnnnnnnnnnnnnnnnnnnnnnnnnnnnnnnnnnnnnnnnnnnnnnnnnnnnnnnnnnnnnnnnnnnnnnnnnnnnnnnnnnnnnnnnnnnnnnnnnnnnnnnnnnnnnnnnnnnnnnnnnnnnnnnnnnnnnnnnnnnnnnnnnnnnnnnnnnnnnnnnnnnnnnnnnnnnnnnnnnnnnnnnnnnnnnnnnnnnnnnnnnnnnnnnnnnnnnnnnnnnnnnnnnnnnnnnnnnnnnnnnnnnnnnnnnnnnnnnnnnnnnnnnnnnnnnnnnnnnnnnnnnnnnnnnnnnnnnnnnnnnnnnnnnnnnnnnnnnnnnnnnnnnnnnnnnnnnnnnnnnnnnnnnnnnnnnnnnnnnnnnnnnnnnnnnnnnnnnnnnnnnnnnnnnnnnnnnnnnnnnnnnnnnnnnnnnnnnnnnnnnnnnnnnnnnnnnnnnnnnnnnnnnnnnnnnnnnnnnnnnnnnnnnnnnnnnnnnnnnnnnnnnnnnnnnnnnnnnnnnnnnnnnnnnnnnnnnnnnnnnnnnnnnnnnnnnnnnnnnnnnnnnnnnnnnnnnnnnnnnnnnnnnnnnnnnnnnnnnnnnnnnnnnnnnnnnnnnnnnnnnnnnnnnnnnnnnnnnnnnnnnnnnnnnnnnnnnnnnnnnnnnnnnnnnnnnnnnnnnnnnnnnnnnnnnnnnnnnnnnnnnnnnnnnnnnnnnnnnnnnnnnnnnnnnnnnnnnnnnnnnnnnnnnnnnnnnnnnnnnnnnnnnnnnnnnnnnnnnnnnnnnnnnnnnnnnnnnnnnnnnnnnnnnnnnnnnnnnnnnnnnnnnnnnnnnnnnnnnnnnnnnnnnnnnnnnnnnnnnnnnnnnnnnnnnnnnnnnnnnnnnnnnnnnnnnnnnnnnnnnnnnnnnnnnnnnnnnnnnnnnnnnnnnnnnnnnnnnnnnnnnnnnnnnnnnnnnnnnnnnnnnnnnnnnnnnnnnnnnnnnnnnnnnnnnnnnnnnnnnnnnnnnnnnnnnnnnnnnnnnnnnnnnnnnnnnnnnnnnnnnnnnnnnnnnnnnnnnnnnnnnnnnnnnnnnnnnnnnnnnnnnnnnnnnnnnnnnnnnnnnnnnnnnnnnnnnnnnnnnnnnnnnnnnnnnnnnnnnnnnnnnnnnnnnnnnnnnnnnnnnnnnnnnnnnnnnnnnnnnnnnnnnnnnnnnnnnnnnnnnnnnnnnnnnnnnnnnnnnnnnnnnnnnnnnnnnnnnnnnnnnnnnnnnnnnnnnnnnnnnnnnnnnnnnnnnnnnnnnnnnnnnnnnnnnnnnnnnnnnnnnnnnnnnnnnnnnnnnnnnnnnnnnnnnnnnnnnnnnnnnnnnnnnnnnnnnnnnnnnnnnnnnnnnnnnnnnnnnnnnnnnnnnnnnnnnnnnnnnnnnnnnnnnnnnnnnnnnnnnnnnnnnnnnnnnnnnnnnnnnnnnnnnnnnnnnnnnnnnnnnnnnnnnnnnnnnnnnnnnnnnnnnnnnnnnnnnnnnnnnnnnnnnnnnnnnnnnnnnnnnnnnnnnnnnnnnnnnnnnnnnnnnnnnnnnnnnnnnnnnnnnnnnnnnnnnnnnnnnnnnnnnnnnnnnnnnnnnnnnnnnnnnnnnnnnnnnnnnnnnnnnnnnnnnnnnnnnnnnnnnnnnnnnnnnnnnnnnnnnnnnnnnnnnnnnnnnnnnnnnnnnnnnnnnnnnnnnnnnnnnnnnnnnnnnnnnnnnnnnnnnnnnnnnnnnnnnnnnnnnnnnnnnnnnnnnnnnnnnnnnnnnnnnnnnnnnnnnnnnnnnnnnnnnnnnnnnnnnnnnnnnnnnnnnnnnnnnnnnnnnnnnnnnnnnnnnnnnnnnnnnnnnnnnnnnnnnnnnnnnnnnnnnnnnnnnnnnnnnnnnnnnnnnnnnnnnnnnnnnnnnnnnnnnnnnnnnnnnnnnnnnnnnnnnnnnnnnnnnnnnnnnnnnnnnnnnnnnnnnnnnnnnnnnnnnnnnnnnnnnnnnnnnnnnnnnnnnnnnnnnnnnnnnnnnnnnnnnnnnnnnnnnnnnnnnnnnnnnnnnnnnnnnnnnnnnnnnnnnnnnnnnnnnnnnnnnnnnnnnnnnnnnnnnnnnnnnnnnnnnnnnnnnnnnnnnnnnnnnnnnnnnnnnnnnnnnnnnnnnnnnnnnnnnnnnnnnnnnnnnnnnnnnnnnnnnnnnnnnnnnnnnnnnnnnnnnnnnnnnnnnnnnnnnnnnnnnnnnnnnnnnnnnnnnnnnnnnnnnnnnnnnnnnnnnnnnnnnnnnnnnnnnnnnnnnnnnnnnnnnnnnnnnnnnnnnnnnnnnnnnnnnnnnnnnnnnnnnnnnnnnnnnnnnnnnnnnnnnnnnnnnnnnnnnnnnnnnnnnnnnnnnnnnnnnnnnnnnnnnnnnnnnnnnnnnnnnnnnnnnnnnnnnnnnnnnnnnnnnnnnnnnnnnnnnnnnnnnnnnnnnnnnnnnnnnnnnnnnnnnnnnnnnnnnnnnnnnnnnnnnnnnnnnnnnnnnnnnnnnnnnnnnnnnnnnnnnnnnnnnnnnnnnnnnnnnnnnnnnnnnnnnnnnnnnnnnnnnnnnnnnnnnnnnnnnnnnnnnnnnnnnnnnnnnnnnnnnnnnnnnnnnnnnnnnnnnnnnnnnnnnnnnnnnnnnnnnnnnnnnnnnnnnnnnnnnnnnnnnnnnnnnnnnnnnnnnnnnnnnnnnnnnnnnnnnnnnnnnnnnnnnnnnnnnnnnnnnnnnnnnnnnnnnnnnnnnnnnnnnnnnnnnnnnnnnnnnnnnnnnnnnnnnnnnnnnnnnnnnnnnnnnnnnnnnnnnnnnnnnnnnnnnnnnnnnnnnnnnnnnnnnnnnnnnnnnnnnnnnnnnnnnnnnnnnnnnnnnnnnnnnnnnnnnnnnnnnnnnnnnnnnnnnnnnnnnnnnnnnnnnnnnnnnnnnnnnnnnnnnnnnnnnnnnnnnnnnnnnnnnnnnnnnnnnnnnnnnnnnnnnnnnnnnnnnnnnnnnnnnnnnnnnnnnnnnnnnnnnnnnnnnnnnnnnnnnnnnnnnnnnnnnnnnnnnnnnnnnnnnnnnnnnnnnnnnnnnnnnnnnnnnnnnnnnnnnnnnnnnnnnnnnnnnnnnnnnnnnnnnnnnnnnnnnnnnnnnnnnnnnnnnnnnnnnnnnnnnnnnnnnnnnnnnnnnnnnnnnnnnnnnnnnnnnnnnnnnnnnnnnnnnnnnnnnnnnnnnnnnnnnnnnnnnnnnnnnnnnnnnnnnnnnnnnnnnnnnnnnnnnnnnnnnnnnnnnnnnnnnnnnnnnnnnnnnnnnnnnnnnnnnnnnnnnnnnnnnnnnnnnnnnnnnnnnnnnnnnnnnnnnnnnnnnnnnnnnnnnnnnnnnnnnnnnnnnnnnnnnnnnnnnnnnnnnnnnnnnnnnnnnnnnnnnnnnnnnnnnnnnnnnnnnnnnnnnnnnnnnnnnnnnnnnnnnnnnnnnnnnnnnnnnnnnnnnnnnnnnnnnnnnnnnnnnnnnnnnnnnnnnnnnnnnnnnnnnnnnnnnnnnnnnnnnnnnnnnnnnnnnnnnnnnnnnnnnnnnnnnnnnnnnnnnnnnnnnnnnnnnnnnnnnnnnnnnnnnnnnnnnnnnnnnnnnnnnnnnnnnnnnnnnnnnnnnnnnnnnnnnnnnnnnnnnnnnnnnnnnnnnnnnnnnnnnnnnnnnnnnnnnnnnnnnnnnnnnnnnnnnnnnnnnnnnnnnnnnnnnnnnnnnnnnnnnnnnnnnnnnnnnnnnnnnnnnnnnnnnnnnnnnnnnnnnnnnnnnnnnnnnnnnnnnnnnnnnnnnnnnnnnnnnnnnnnnnnnnnnnnnnnnnnnnnnnnnnnnnnnnnnnnnnnnnnnnnnnnnnnnnnnnnnnnnnnnnnnnnnnnnnnnnnnnnnnnnnnnnnnnnnnnnnnnnnnnnnnnnnnnnnnnnnnnnnnnnnnnnnnnnnnnnnnnnnnnnnnnnnnnnnnnnnnnnnnnnnnnnnnnnnnnnnnnnnnnnnnnnnnnnnnnnnnnnnnnnnnnnnnnnnnnnnnnnnnnnnnnnnnnnnnnnnnnnnnnnnnnnnnnnnnnnnnnnnnnnnnnnnnnnnnnnnnnnnnnnnnnnnnnnnnnnnnnnnnnnnnnnnnnnnnnnnnnnnnnnnnnnnnnnnnnnnnnnnnnnnnnnnnnnnnnnnnnnnnnnnnnnnnnnnnnnnnnnnnnnnnnnnnnnnnnnnnnnnnnnnnnnnnnnnnnnnnnnnnnnnnnnnnnnnnnnnnnnnnnnnnnnnnnnnnnnnnnnnnnnnnnnnnnnnnnnnnnnnnnnnnnnnnnnnnnnnnnnnnnnnnnnnnnnnnnnnnnnnnnnnnnnnnnnnnnnnnnnnnnnnnnnnnnnnnnnnnnnnnnnnnnnnnnnnnnnnnnnnnnnnnnnnnnnnnnnnnnnnnnnnnnnnnnnnnnnnnnnnnnnnnnnnnnnnnnnnnnnnnnnnnnnnnnnnnnnnnnnnnnnnnnnnnnnnnnnnnnnnnnnnnnnnnnnnnnnnnnnnnnnnnnnnnnnnnnnnnnnnnnnnnnnnnnnnnnnnnnnnnnnnnnnnnnnnnnnnnnnnnnnnnnnnnnnnnnnnnnnnnnnnnnnnnnnnnnnnnnnnnnnnnnnnnnnnnnnnnnnnnnnnnnnnnnnnnnnnnnnnnnnnnnnnnnnnnnnnnnnnnnnnnnnnnnnnnnnnnnnnnnnnnnnnnnnnnnnnnnnnnnnnnnnnnnnnnnnnnnnnnnnnnnnnnnnnnnnnnnnnnnnnnnnnnnnnnnnnnnnnnnnnnnnnnnnnnnnnnnnnnnnnnnnnnnnnnnnnnnnnnnnnnnnnnnnnnnnnnnnnnnnnnnnnnnnnnnnnnnnnnnnnnnnnnnnnnnnnnnnnnnnnnnnnnnnnnnnnnnnnnnnnnnnnnnnnnnnnnnnnnnnnnnnnnnnnnnnnnnnnnnnnnnnnnnnnnnnnnnnnnnnnnnnnnnnnnnnnnnnnnnnnnnnnnnnnnnnnnnnnnnnnnnnnnnnnnnnnnnnnnnnnnnnnnnnnnnnnnnnnnnnnnnnnnnnnnnnnnnnnnnnnnnnnnnnnnnnnnnnnnnnnnnnnnnnnnnnnnnnnnnnnnnnnnnnnnnnnnnnnnnnnnnnnnnnnnnnnnnnnnnnnnnnnnnnnnnnnnnnnnnnnnnnnnnnnnnnnnnnnnnnnnnnnnnnnnnnnnnnnnnnnnnnnnnnnnnnnnnnnnnnnnnnnnnnnnnnnnnnnnnnnnnnnnnnnnnnnnnnnnnnnnnnnnnnnnnnnnnnnnnnnnnnnnnnnnnnnnnnnnnnnnnnnnnnnnnnnnnnnnnnnnnnnnnnnnnnnnnnnnnnnnnnnnnnnnnnnnnnnnnnnnnnnnnnnnnnnnnnnnnnnnnnnnnnnnnnnnnnnnnnnnnnnnnnnnnnnnnnnnnnnnnnnnnnnnnnnnnnnnnnnnnnnnnnnnnnnnnnnnnnnnnnnnnnnnnnnnnnnnnnnnnnnnnnnnnnnnnnnnnnnnnnnnnnnnnnnnnnnnnnnnnnnnnnnnnnnnnnnnnnnnnnnnnnnnnnnnnnnnnnnnnnnnnnnnnnnnnnnnnnnnnnnnnnnnnnnnnnnnnnnnnnnnnnnnnnnnnnnnnnnnnnnnnnnnnnnnnnnnnnnnnnnnnnnnnnnnnnnnnnnnnnnnnnnnnnnnnnnnnnnnnnnnnnnnnnnnnnnnnnnnnnnnnnnnnnnnnnnnnnnnnnnnnnnnnnnnnnnnnnnnnnnnnnnnnnnnnnnnnnnnnnnnnnnnnnnnnnnnnnnnnnnnnnnnnnnnnnnnnnnnnnnnnnnnnnnnnnnnnnnnnnnnnnnnnnnnnnnnnnnnnnnnnnnnnnnnnnnnnnnnnnnnnnnnnnnnnnnnnnnnnnnnnnnnnnnnnnnnnnnnnnnnnnnnnnnnnnnnnnnnnnnnnnnnnnnnnnnnnnnnnnnnnnnnnnnnnnnnnnnnnnnnnnnnnnnnnnnnnnnnnnnnnnnnnnnnnnnnnnnnnnnnnnnnnnnnnnnnnnnnnnnnnnnnnnnnnnnnnnnnnnnnnnnnnnnnnnnnnnnnnnnnnnnnnnnnnnnnnnnnnnnnnnnnnnnnnnnnnnnnnnnnnnnnnnnnnnnnnnnnnnnnnnnnnnnnnnnnnnnnnnnnnnnnnnnnnnnnnnnnnnnnnnnnnnnnnnnnnnnnnnnnnnnnnnnnnnnnnnnnnnnnnnnnnnnnnnnnnnnnnnnnnnnnnnnnnnnnnnnnnnnnnnnnnnnnnnnnnnnnnnnnnnnnnnnnnnnnnnnnnnnnnnnnnnnnnnnnnnnnnnnnnnnnnnnnnnnnnnnnnnnnnnnnnnnnnnnnnnnnnnnnnnnnnnnnnnnnnnnnnnnnnnnnnnnnnnnnnnnnnnnnnnnnnnnnnnnnnnnnnnnnnnnnnnnnnnnnnnnnnnnnnnnnnnnnnnnnnnnnnnnnnnnnnnnnnnnnnnnnnnnnnnnnnnnnnnnnnnnnnnnnnnnnnnnnnnnnnnnnnnnnnnnnnnnnnnnnnnnnnnnnnnnnnnnnnnnnnnnnnnnnnnnnnnnnnnnnnnnnnnnnnnnnnnnnnnnnnnnnnnnnnnnnnnnnnnnnnnnnnnnnnnnnnnnnnnnnnnnnnnnnnnnnnnnnnnnnnnnnnnnnnnnnnnnnnnnnnnnnnnnnnnnnnnnnnnnnnnnnnnnnnnnnnnnnnnnnnnnnnnnnnnnnnnnnnnnnnnnnnnnnnnnnnnnnnnnnnnnnnnnnnnnnnnnnnnnnnnnnnnnnnnnnnnnnnnnnnnnnnnnnnnnnnnnnnnnnnnnnnnnnnnnnnnnnnnnnnnnnnnnnnnnnnnnnnnnnnnnnnnnnnnnnnnnnnnnnnnnnnnnnnnnnnnnnnnnnnnnnnnnnnnnnnnnnnnnnnnnnnnnnnnnnnnnnnnnnnnnnnnnnnnnnnnnnnnnnnnnnnnnnnnnnnnnnnnnnnnnnnnnnnnnnnnnnnnnnnnnnnnnnnnnnnnnnnnnnnnnnnnnnnnnnnnnnnnnnnnnnnnnnnnnnnnnnnnnnnnnnnnnnnnnnnnnnnnnnnnnnnnnnnnnnnnnnnnnnnnnnnnnnnnnnnnnnnnnnnnnnnnnnnnnnnnnnnnnnnnnnnnnnnnnnnnnnnnnnnnnnnnnnnnnnnnnnnnnnnnnnnnnnnnnnnnnnnnnnnnnnnnnnnnnnnnnnnnnnnnnnnnnnnnnnnnnnnnnnnnnnnnnnnnnnnnnnnnnnnnnnnnnnnnnnnnnnnnnnnnnnnnnnnnnnnnnnnnnnnnnnnnnnnnnnnnnnnnnnnnnnnnnnnnnnnnnnnnnnnnnnnnnnnnnnnnnnnnnnnnnnnnnnnnnnnnnnnnnnnnnnnnnnnnnnnnnnnnnnnnnnnnnnnnnnnnnnnnnnnnnnnnnnnnnnnnnnnnnnnnnnnnnnnnnnnnnnnnnnnnnnnnnnnnnnnnnnnnnnnnnnnnnnnnnnnnnnnnnnnnnnnnnnnnnnnnnnnnnnnnnnnnnnnnnnnnnnnnnnnnnnnnnnnnnnnnnnnnnnnnnnnnnnnnnnnnnnnnnnnnnnnnnnnnnnnnnnnnnnnnnnnnnnnnnnnnnnnnnnnnnnnnnnnnnnnnnnnnnnnnnnnnnnnnnnnnnnnnnnnnnnnnnnnnnnnnnnnnnnnnnnnnnnnnnnnnnnnnnnnnnnnnnnnnnnnnnnnnnnnnnnnnnnnnnnnnnnnnnnnnnnnnnnnnnnnnnnnnnnnnnnnnnnnnnnnnnnnnnnnnnnnnnnnnnnnnnnnnnnnnnnnnnnnnnnnnnnnnnnnnnnnnnnnnnnnnnnnnnnnnnnnnnnnnnnnnnnnnnnnnnnnnnnnnnnnnnnnnnnnnnnnnnnnnnnnnnnnnnnnnnnnnnnnnnnnnnnnnnnnnnnnnnnnnnnnnnnnnnnnnnnnnnnnnnnnnnnnnnnnnnnnnnnnnnnnnnnnnnnnnnnnnnnnnnnnnnnnnnnnnnnnnnnnnnnnnnnnnnnnnnnnnnnnnnnnnnnnnnnnnnnnnnnnnnnnnnnnnnnnnnnnnnnnnnnnnnnnnnnnnnnnnnnnnnnnnnnnnnnnnnnnnnnnnnnnnnnnnnnnnnnnnnnnnnnnnnnnnnnnnnnnnnnnnnnnnnnnnnnnnnnnnnnnnnnnnnnnnnnnnnnnnnnnnnnnnnnnnnnnnnnnnnnnnnnnnnnnnnnnnnnnnnnnnnnnnnnnnnnnnnnnnnnnnnnnnnnnnnnnnnnnnnnnnnnnnnnnnnnnnnnnnnnnnnnnnnnnnnnnnnnnnnnnnnnnnnnnnnnnnnnnnnnnnnnnnnnnnnnnnnnnnnnnnnnnnnnnnnnnnnnnnnnnnnnnnnnnnnnnnnnnnnnnnnnnnnnnnnnnnnnnnnnnnnnnnnnnnnnnnnnnnnnnnnnnnnnnnnnnnnnnnnnnnnnnnnnnnnnnnnnnnnnnnnnnnnnnnnnnnnnnnnnnnnnnnnnnnnnnnnnnnnnnnnnnnnnnnnnnnnnnnnnnnnnnnnnnnnnnnnnnnnnnnnnnnnnnnnnnnnnnnnnnnnnnnnnnnnnnnnnnnnnnnnnnnnnnnnnnnnnnnnnnnnnnnnnnnnnnnnnnnnnnnnnnnnnnnnnnnnnnnnnnnnnnnnnnnnnnnnnnnnnnnnnnnnnnnnnnnnnnnnnnnnnnnnnnnnnnnnnnnnnnnnnnnnnnnnnnnnnnnnnnnnnnnnnnnnnnnnnnnnnnnnnnnnnnnnnnnnnnnnnnnnnnnnnnnnnnnnnnnnnnnnnnnnnnnnnnnnnnnnnnnnnnnnnnnnnnnnnnnnnnnnnnnnnnnnnnnnnnnnnnnnnnnnnnnnnnnnnnnnnnnnnnnnnnnnnnnnnnnnnnnnnnnnnnnnnnnnnnnnnnnnnnnnnnnnnnnnnnnnnnnnnnnnnnnnnnnnnnnnnnnnnnnnnnnnnnnnnnnnnnnnnnnnnnnnnnnnnnnnnnnnnnnnnnnnnnnnnnnnnnnnnnnnnnnnnnnnnnnnnnnnnnnnnnnnnnnnnnnnnnnnnnnnnnnnnnnnnnnnnnnnnnnnnnnnnnnnnnnnnnnnnnnnnnnnnnnnnnnnnnnnnnnnnnnnnnnnnnnnnnnnnnnnnnnnnnnnnnnnnnnnnnnnnnnnnnnnnnnnnnnnnnnnnnnnnnnnnnnnnnnnnnnnnnnnnnnnnnnnnnnnnnnnnnnnnnnnnnnnnnnnnnnnnnnnnnnnnnnnnnnnnnnnnnnnnnnnnnnnnnnnnnnnnnnnnnnnnnnnnnnnnnnnnnnnnnnnnnnnnnnnnnnnnnnnnnnnnnnnnnnnnnnnnnnnnnnnnnnnnnnnnnnnnnnnnnnnnnnnnnnnnnnnnnnnnnnnnnnnnnnnnnnnnnnnnnnnnnnnnnnnnnnnnnnnnnnnnnnnnnnnnnnnnnnnnnnnnnnnnnnnnnnnnnnnnnnnnnnnnnnnnnnnnnnnnnnnnnnnnnnnnnnnnnnnnnnnnnnnnnnnnnnnnnnnnnnnnnnnnnnnnnnnnnnnnnnnnnnnnnnnnnnnnnnnnnnnnnnnnnnnnnnnnnnnnnnnnnnnnnnnnnnnnnnnnnnnnnnnnnnnnnnnnnnnnnnnnnnnnnnnnnnnnnnnnnnnnnnnnnnnnnnnnnnnnnnnnnnnnnnnnnnnnnnnnnnnnnnnnnnnnnnnnnnnnnnnnnnnnnnnnnnnnnnnnnnnnnnnnnnnnnnnnnnnnnnnnnnnnnnnnnnnnnnnnnnnnnnnnnnnnnnnnnnnnnnnnnnnnnnnnnnnnnnnnnnnnnnnnnnnnnnnnnnnnnnnnnnnnnnnnnnnnnnnnnnnnnnnnnnnnnnnnnnnnnnnnnnnnnnnnnnnnnnnnnnnnnnnnnnnnnnnnnnnnnnnnnnnnnnnnnnnnnnnnnnnnnnnnnnnnnnnnnnnnnnnnnnnnnnnnnnnnnnnnnnnnnnnnnnnnnnnnnnnnnnnnnnnnnnnnnnnnnnnnnnnnnnnnnnnnnnnnnnnnnnnnnnnnnnnnnnnnnnnnnnnnnnnnnnnnnnnnnnnnnnnnnnnnnnnnnnnnnnnnnnnnnnnnnnnnnnnnnnnnnnnnnnnnnnnnnnnnnnnnnnnnnnnnnnnnnnnnnnnnnnnnnnnnnnnnnnnnnnnnnnnnnnnnnnnnnnnnnnnnnnnnnnnnnnnnnnnnnnnnnnnnnnnnnnnnnnnnnnnnnnnnnnnnnnnnnnnnnnnnnnnnnnnnnnnnnnnnnnnnnnnnnnnnnnnnnnnnnnnnnnnnnnnnnnnnnnnnnnnnnnnnnnnnnnnnnnnnnnnnnnnnnnnnnnnnnnnnnnnnnnnnnnnnnnnnnnnnnnnnnnnnnnnnnnnnnnnnnnnnnnnnnnnnnnnnnnnnnnnnnnnnnnnnnnnnnnnnnnnnnnnnnnnnnnnnnnnnnnnnnnnnnnnnnnnnnnnnnnnnnnnnnnnnnnnnnnnnnnnnnnnnnnnnnnnnnnnnnnnnnnnnnnnnnnnnnnnnnnnnnnnnnnnnnnnnnnnnnnnnnnnnnnnnnnnnnnnnnnnnnnnnnnnnnnnnnnnnnnnnnnnnnnnnnnnnnnnnnnnnnnnnnnnnnnnnnnnnnnnnnnnnnnnnnnnnnnnnnnnnnnnnnnnnnnnnnnnnnnnnnnnnnnnnnnnnnnnnnnnnnnnnnnnnnnnnnnnnnnnnnnnnnnnnnnnnnnnnnnnnnnnnnnnnnnnnnnnnnnnnnnnnnnnnnnnnnnnnnnnnnnnnnnnnnnnnnnnnnnnnnnnnnnnnnnnnnnnnnnnnnnnnnnnnnnnnnnnnnnnnnnnnnnnnnnnnnnnnnnnnnnnnnnnnnnnnnnnnnnnnnnnnnnnnnnnnnnnnnnnnnnnnnnnnnnnnnnnnnnnnnnnnnnnnnnnnnnnnnnnnnnnnnnnnnnnnnnnnnnnnnnnnnnnnnnnnnnnnnnnnnnnnnnnnnnnnnnnnnnnnnnnnnnnnnnnnnnnnnnnnnnnnnnnnnnnnnnnnnnnnnnnnnnnnnnnnnnnnnnnnnnnnnnnnnnnnnnnnnnnnnnnnnnnnnnnnnnnnnnnnnnnnnnnnnnnnnnnnnnnnnnnnnnnnnnnnnnnnnnnnnnnnnnnnnnnnnnnnnnnnnnnnnnnnnnnnnnnnnnnnnnnnnnnnnnnnnnnnnnnnnnnnnnnnnnnnnnnnnnnnnnnnnnnnnnnnnnnnnnnnnnnnnnnnnnnnnnnnnnnnnnnnnnnnnnnnnnnnnnnnnnnnnnnnnnnnnnnnnnnnnnnnnnnnnnnnnnnnnnnnnnnnnnnnnnnnnnnnnnnnnnnnnnnnnnnnnnnnnnnnnnnnnnnnnnnnnnnnnnnnnnnnnnnnnnnnnnnnnnnnnnnnnnnnnnnnnnnnnnnnnnnnnnnnnnnnnnnnnnnnnnnnnnnnnnnnnnnnnnnnnnnnnnnnnnnnnnnnnnnnnnnnnnnnnnnnnnnnnnnnnnnnnnnnnnnnnnnnnnnnnnnnnnnnnnnnnnnnnnnnnnnnnnnnnnnnnnnnnnnnnnnnnnnnnnnnnnnnnnnnnnnnnnnnnnnnnnnnnnnnnnnnnnnnnnnnnnnnnnnnnnnnnnnnnnnnnnnnnnnnnnnnnnnnnnnnnnnnnnnnnnnnnnnnnnnnnnnnnnnnnnnnnnnnnnnnnnnnnnnnnnnnnnnnnnnnnnnnnnnnnnnnnnnnnnnnnnnnnnnnnnnnnnnnnnnnnnnnnnnnnnnnnnnnnnnnnnnnnnnnnnnnnnnnnnnnnnnnnnnnnnnnnnnnnnnnnnnnnnnnnnnnnnnnnnnnnnnnnnnnnnnnnnnnnnnnnnnnnnnnnnnnnnnnnnnnnnnnnnnnnnnnnnnnnnnnnnnnnnnnnnnnnnnnnnnnnnnnnnnnnnnnnnnnnnnnnnnnnnnnnnnnnnnnnnnnnnnnnnnnnnnnnnnnnnnnnnnnnnnnnnnnnnnnnnnnnnnnnnnnnnnnnnnnnnnnnnnnnnnnnnnnnnnnnnnnnnnnnnnnnnnnnnnnnnnnnnnnnnnnnnnnnnnnnnnnnnnnnnnnnnnnnnnnnnnnnnnnnnnnnnnnnnnnnnnnnnnnnnnnnnnnnnnnnnnnnnnnnnnnnnnnnnnnnnnnnnnnnnnnnnnnnnnnnnnnnnnnnnnnnnnnnnnnnnnnnnnnnnnnnnnnnnnnnnnnnnnnnnnnnnnnnnnnnnnnnnnnnnnnnnnnnnnnnnnnnnnnnnnnnnnnnnnnnnnnnnnnnnnnnnnnnnnnnnnnnnnnnnnnnnnnnnnnnnnnnnnnnnnnnnnnnnnnnnnnnnnnnnnnnnnnnnnnnnnnnnnnnnnnnnnnnnnnnnnnnnnnnnnnnnnnnnnnnnnnnnnnnnnnnnnnnnnnnnnnnnnnnnnnnnnnnnnnnnnnnnnnnnnnnnnnnnnnnnnnnnnnnnnnnnnnnnnnnnnnnnnnnnnnnnnnnnnnnnnnnnnnnnnnnnnnnnnnnnnnnnnnnnnnnnnnnnnnnnnnnnnnnnnnnnnnnnnnnnnnnnnnnnnnnnnnnnnnnnnnnnnnnnnnnnnnnnnnnnnnnnnnnnnnnnnnnnnnnnnnnnnnnnnnnnnnnnnnnnnnnnnnnnnnnnnnnnnnnnnnnnnnnnnnnnnnnnnnnnnnnnnnnnnnnnnnnnnnnnnnnnnnnnnnnnnnnnnnnnnnnnnnnnnnnnnnnnnnnnnnnnnnnnnnnnnnnnnnnnnnnnnnnnnnnnnnnnnnnnnnnnnnnnnnnnnnnnnnnnnnnnnnnnnnnnnnnnnnnnnnnnnnnnnnnnnnnnnnnnnnnnnnnnnnnnnnnnnnnnnnnnnnnnnnnnnnnnnnnnnnnnnnnnnnnnnnnnnnnnnnnnnnnnnnnnnnnnnnnnnnnnnnnnnnnnnnnnnnnnnnnnnnnnnnnnnnnnnnnnnnnnnnnnnnnnnnnnnnnnnnnnnnnnnnnnnnnnnnnnnnnnnnnnnnnnnnnnnnnnnnnnnnnnnnnnnnnnnnnnnnnnnnnnnnnnnnnnnnnnnnnnnnnnnnnnnnnnnnnnnnnnnnnnnnnnnnnnnnnnnnnnnnnnnnnnnnnnnnnnnnnnnnnnnnnnnnnnnnnnnnnnnnnnnnnnnnnnnnnnnnnnnnnnnnnnnnnnnnnnnnnnnnnnnnnnnnnnnnnnnnnnnnnnnnnnnnnnnnnnnnnnnnnnnnnnnnnnnnnnnnnnnnnnnnnnnnnnnnnnnnnnnnnnnnnnnnnnnnnnnnnnnnnnnnnnnnnnnnnnnnnnnnnnnnnnnnnnnnnnnnnnnnnnnnnnnnnnnnnnnnnnnnnnnnnnnnnnnnnnnnnnnnnnnnnnnnnnnnnnnnnnnnnnnnnnnnnnnnnnnnnnnnnnnnnnnnnnnnnnnnnnnnnnnnnnnnnnnnnnnnnnnnnnnnnnnnnnnnnnnnnnnnnnnnnnnnnnnnnnnnnnnnnnnnnnnnnnnnnnnnnnnnnnnnnnnnnnnnnnnnnnnnnnnnnnnnnnnnnnnnnnnnnnnnnnnnnnnnnnnnnnnnnnnnnnnnnnnnnnnnnnnnnnnnnnnnnnnnnnnnnnnnnnnnnnnnnnnnnnnnnnnnnnnnnnnnnnnnnnnnnnnnnnnnnnnnnnnnnnnnnnnnnnnnnnnnnnnnnnnnnnnnnnnnnnnnnnnnnnnnnnnnnnnnnnnnnnnnnnnnnnnnnnnnnnnnnnnnnnnnnnnnnnnnnnnnnnnnnnnnnnnnnnnnnnnnnnnnnnnnnnnnnnnnnnnnnnnnnnnnnnnnnnnnnnnnnnnnnnnnnnnnnnnnnnnnnnnnnnnnnnnnnnnnnnnnnnnnnnnnnnnnnnnnnnnnnnnnnnnnnnnnnnnnnnnnnnnnnnnnnnnnnnnnnnnnnnnnnnnnnnnnnnnnnnnnnnnnnnnnnnnnnnnnnnnnnnnnnnnnnnnnnnnnnnnnnnnnnnnnnnnnnnnnnnnnnnnnnnnnnnnnnnnnnnnnnnnnnnnnnnnnnnnnnnnnnnnnnnnnnnnnnnnnnnnnnnnnnnnnnnnnnnnnnnnnnnnnnnnnnnnnnnnnnnnnnnnnnnnnnnnnnnnnnnnnnnnnnnnnnnnnnnnnnnnnnnnnnnnnnnnnnnnnnnnnnnnnnnnnnnnnnnnnnnnnnnnnnnnnnnnnnnnnnnnnnnnnnnnnnnnnnnnnnnnnnnnnnnnnnnnnnnnnnnnnnnnnnnnnnnnnnnnnnnnnnnnnnnnnnnnnnnnnnnnnnnnnnnnnnnnnnnnnnnnnnnnnnnnnnnnnnnnnnnnnnnnnnnnnnnnnnnnnnnnnnnnnnnnnnnnnnnnnnnnnnnnnnnnnnnnnnnnnnnnnnnnnnnnnnnnnnnnnnnnnnnnnnnnnnnnnnnnnnnnnnnnnnnnnnnnnnnnnnnnnnnnnnnnnnnnnnnnnnnnnnnnnnnnnnnnnnnnnnnnnnnnnnnnnnnnnnnnnnnnnnnnnnnnnnnnnnnnnnnnnnnnnnnnnnnnnnnnnnnnnnnnnnnnnnnnnnnnnnnnnnnnnnnnnnnnnnnnnnnnnnnnnnnnnnnnnnnnnnnnnnnnnnnnnnnnnnnnnnnnnnnnnnnnnnnnnnnnnnnnnnnnnnnnnnnnnnnnnnnnnnnnnnnnnnnnnnnnnnnnnnnnnnnnnnnnnnnnnnnnnnnnnnnnnnnnnnnnnnnnnnnnnnnnnnnnnnnnnnnnnnnnnnnnnnnnnnnnnnnnnnnnnnnnnnnnnnnnnnnnnnnnnnnnnnnnnnnnnnnnnnnnnnnnnnnnnnnnnnnnnnnnnnnnnnnnnnnnnnnnnnnnnnnnnnnnnnnnnnnnnnnnnnnnnnnnnnnnnnnnnnnnnnnnnnnnnnnnnnnnnnnnnnnnnnnnnnnnnnnnnnnnnnnnnnnnnnnnnnnnnnnnnnnnnnnnnnnnnnnnnnnnnnnnnnnnnnnnnnnnnnnnnnnnnnnnnnnnnnnnnnnnnnnnnnnnnnnnnnnnnnnnnnnnnnnnnnnnnnnnnnnnnnnnnnnnnnnnnnnnnnnnnnnnnnnnnnnnnnnnnnnnnnnnnnnnnnnnnnnnnnnnnnnnnnnnnnnnnnnnnnnnnnnnnnnnnnnnnnnnnnnnnnnnnnnnnnnnnnnnnnnnnnnnnnnnnnnnnnnnnnnnnnnnnnnnnnnnnnnnnnnnnnnnnnnnnnnnnnnnnnnnnnnnnnnnnnnnnnnnnnnnnnnnnnnnnnnnnnnnnnnnnnnnnnnnnnnnnnnnnnnnnnnnnnnnnnnnnnnnnnnnnnnnnnnnnnnnnnnnnnnnnnnnnnnnnnnnnnnnnnnnnnnnnnnnnnnnnnnnnnnnnnnnnnnnnnnnnnnnnnnnnnnnnnnnnnnnnnnnnnnnnnnnnnnnnnnnnnnnnnnnnnnnnnnnnnnnnnnnnnnnnnnnnnnnnnnnnnnnnnnnnnnnnnnnnnnnnnnnnnnnnnnnnnnnnnnnnnnnnnnnnnnnnnnnnnnnnnnnnnnnnnnnnnnnnnnnnnnnnnnnnnnnnnnnnnnnnnnnnnnnnnnnnnnnnnnnnnnnnnnnnnnnnnnnnnnnnnnnnnnnnnnnnnnnnnnnnnnnnnnnnnnnnnnnnnnnnnnnnnnnnnnnnnnnnnnnnnnnnnnnnnnnnnnnnnnnnnnnnnnnnnnnnnnnnnnnnnnnnnnnnnnnnnnnnnnnnnnnnnnnnnnnnnnnnnnnnnnnnnnnnnnnnnnnnnnnnnnnnnnnnnnnnnnnnnnnnnnnnnnnnnnnnnnnnnnnnnnnnnnnnnnnnnnnnnnnnnnnnnnnnnnnnnnnnnnnnnnnnnnnnnnnnnnnnnnnnnnnnnnnnnnnnnnnnnnnnnnnnnnnnnnnnnnnnnnnnnnnnnnnnnnnnnnnnnnnnnnnnnnnnnnnnnnnnnnnnnnnnnnnnnnnnnnnnnnnnnnnnnnnnnnnnnnnnnnnnnnnnnnnnnnnnnnnnnnnnnnnnnnnnnnnnnnnnnnnnnnnnnnnnnnnnnnnnnnnnnnnnnnnnnnnnnnnnnnnnnnnnnnnnnnnnnnnnnnnnnnnnnnnnnnnnnnnnnnnnnnnnnnnnnnnnnnnnnnnnnnnnnnnnnnnnnnnnnnnnnnnnnnnnnnnnnnnnnnnnnnnnnnnnnnnnnnnnnnnnnnnnnnnnnnnnnnnnnnnnnnnnnnnnnnnnnnnnnnnnnnnnnnnnnnnnnnnnnnnnnnnnnnnnnnnnnnnnnnnnnnnnnnnnnnnnnnnnnnnnnnnnnnnnnnnnnnnnnnnnnnnnnnnnnnnnnnnnnnnnnnnnnnnnnnnnnnnnnnnnnnnnnnnnnnnnnnnnnnnnnnnnnnnnnnnnnnnnnnnnnnnnnnnnnnnnnnnnnnnnnnnnnnnnnnnnnnnnnnnnnnnnnnnnnnnnnnnnnnnnnnnnnnnnnnnnnnnnnnnnnnnnnnnnnnnnnnnnnnnnnnnnnnnnnnnnnnnnnnnnnnnnnnnnnnnnnnnnnnnnnnnnnnnnnnnnnnnnnnnnnnnnnnnnnnnnnnnnnnnnnnnnnnnnnnnnnnnnnnnnnnnnnnnnnnnnnnnnnnnnnnnnnnnnnnnnnnnnnnnnnnnnnnnnnnnnnnnnnnnnnnnnnnnnnnnnnnnnnnnnnnnnnnnnnnnnnnnnnnnnnnnnnnnnnnnnnnnnnnnnnnnnnnnnnnnnnnnnnnnnnnnnnnnnnnnnnnnnnnnnnnnnnnnnnnnnnnnnnnnnnnnnnnnnnnnnnnnnnnnnnnnnnnnnnnnnnnnnnnnnnnnnnnnnnnnnnnnnnnnnnnnnnnnnnnnnnnnnnnnnnnnnnnnnnnnnnnnnnnnnnnnnnnnnnnnnnnnnnnnnnnnnnnnnnnnnnnnnnnnnnnnnnnnnnnnnnnnnnnnnnnnnnnnnnnnnnnnnnnnnnnnnnnnnnnnnnnnnnnnnnnnnnnnnnnnnnnnnnnnnnnnnnnnnnnnnnnnnnnnnnnnnnnnnnnnnnnnnnnnnnnnnnnnnnnnnnnnnnnnnnnnnnnnnnnnnnnnnnnnnnnnnnnnnnnnnnnnnnnnnnnnnnnnnnnnnnnnnnnnnnnnnnnnnnnnnnnnnnnnnnnnnnnnnnnnnnnnnnnnnnnnnnnnnnnnnnnnnnnnnnnnnnnnnnnnnnnnnnnnnnnnnnnnnnnnnnnnnnnnnnnnnnnnnnnnnnnnnnnnnnnnnnnnnnnnnnnnnnnnnnnnnnnnnnnnnnnnnnnnnnnnnnnnnnnnnnnnnnnnnnnnnnnnnnnnnnnnnnnnnnnnnnnnnnnnnnnnnnnnnnnnnnnnnnnnnnnnnnnnnnnnnnnnnnnnnnnnnnnnnnnnnnnnnnnnnnnnnnnnnnnnnnnnnnnnnnnnnnnnnnnnnnnnnnnnnnnnnnnnnnnnnnnnnnnnnnnnnnnnnnnnnnnnnnnnnnnnnnnnnnnnnnnnnnnnnnnnnnnnnnnnnnnnnnnnnnnnnnnnnnnnnnnnnnnnnnnnnnnnnnnnnnnnnnnnnnnnnnnnnnnnnnnnnnnnnnnnnnnnnnnnnnnnnnnnnnnnnnnnnnnnnnnnnnnnnnnnnnnnnnnnnnnnnnnnnnnnnnnnnnnnnnnnnnnnnnnnnnnnnnnnnnnnnnnnnnnnnnnnnnnnnnnnnnnnnnnnnnnnnnnnnnnnnnnnnnnnnnnnnnnnnnnnnnnnnnnnnnnnnnnnnnnnnnnnnnnnnnnnnnnnnnnnnnnnnnnnnnnnnnnnnnnnnnnnnnnnnnnnnnnnnnnnnnnnnnnnnnnnnnnnnnnnnnnnnnnnnnnnnnnnnnnnnnnnnnnnnnnnnnnnnnnnnnnnnnnnnnnnnnnnnnnnnnnnnnnnnnnnnnnnnnnnnnnnnnnnnnnnnnnnnnnnnnnnnnnnnnnnnnnnnnnnnnnnnnnnnnnnnnnnnnnnnnnnnnnnnnnnnnnnnnnnnnnnnnnnnnnnnnnnnnnnnnnnnnnnnnnnnnnnnnnnnnnnnnnnnnnnnnnnnnnnnnnnnnnnnnnnnnnnnnnnnnnnnnnnnnnnnnnnnnnnnnnnnnnnnnnnnnnnnnnnnnnnnnnnnnnnnnnnnnnnnnnnnnnnnnnnnnnnnnnnnnnnnnnnnnnnnnnnnnnnnnnnnnnnnnnnnnnnnnnnnnnnnnnnnnnnnnnnnnnnnnnnnnnnnnnnnnnnnnnnnnnnnnnnnnnnnnnnnnnnnnnnnnnnnnnnnnnnnnnnnnnnnnnnnnnnnnnnnnnnnnnnnnnnnnnnnnnnnnnnnnnnnnnnnnnnnnnnnnnnnnnnnnnnnnnnnnnnnnnnnnnnnnnnnnnnnnnnnnnnnnnnnnnnnnnnnnnnnnnnnnnnnnnnnnnnnnnnnnnnnnnnnnnnnnnnnnnnnnnnnnnnnnnnnnnnnnnnnnnnnnnnnnnnnnnnnnnnnnnnnnnnnnnnnnnnnnnnnnnnnnnnnnnnnnnnnnnnnnnnnnnnnnnnnnnnnnnnnnnnnnnnnnnnnnnnnnnnnnnnnnnnnnnnnnnnnnnnnnnnnnnnnnnnnnnnnnnnnnnnnnnnnnnnnnnnnnnnnnnnnnnnnnnnnnnnnnnnnnnnnnnnnnnnnnnnnnnnnnnnnnnnnnnnnnnnnnnnnnnnnnnnnnnnnnnnnnnnnnnnnnnnnnnnnnnnnnnnnnnnnnnnnnnnnnnnnnnnnnnnnnnnnnnnnnnnnnnnnnnnnnnnnnnnnnnnnnnnnnnnnnnnnnnnnnnnnnnnnnnnnnnnnnnnnnnnnnnnnnnnnnnnnnnnnnnnnnnnnnnnnnnnnnnnnnnnnnnnnnnnnnnnnnnnnnnnnnnnnnnnnnnnnnnnnnnnnnnnnnnnnnnnnnnnnnnnnnnnnnnnnnnnnnnnnnnnnnnnnnnnnnnnnnnnnnnnnnnnnnnnnnnnnnnnnnnnnnnnnnnnnnnnnnnnnnnnnnnnnnnnnnnnnnnnnnnnnnnnnnnnnnnnnnnnnnnnnnnnnnnnnnnnnnnnnnnnnnnnnnnnnnnnnnnnnnnnnnnnnnnnnnnnnnnnnnnnnnnnnnnnnnnnnnnnnnnnnnnnnnnnnnnnnnnnnnnnnnnnnnnnnnnnnnnnnnnnnnnnnnnnnnnnnnnnnnnnnnnnnnnnnnnnnnnnnnnnnnnnnnnnnnnnnnnnnnnnnnnnnnnnnnnnnnnnnnnnnnnnnnnnnnnnnnnnnnnnnnnnnnnnnnnnnnnnnnnnnnnnnnnnnnnnnnnnnnnnnnnnnnnnnnnnnnnnnnnnnnnnnnnnnnnnnnnnnnnnnnnnnnnnnnnnnnnnnnnnnnnnnnnnnnnnnnnnnnnnnnnnnnnnnnnnnnnnnnnnnnnnnnnnnnnnnnnnnnnnnnnnnnnnnnnnnnnnnnnnnnnnnnnnnnnnnnnnnnnnnnnnnnnnnnnnnnnnnnnnnnnnnnnnnnnnnnnnnnnnnnnnnnnnnnnnnnnnnnnnnnnnnnnnnnnnnnnnnnnnnnnnnnnnnnnnnnnnnnnnnnnnnnnnnnnnnnnnnnnnnnnnnnnnnnnnnnnnnnnnnnnnnnnnnnnnnnnnnnnnnnnnnnnnnnnnnnnnnnnnnnnnnnnnnnnnnnnnnnnnnnnnnnnnnnnnnnnnnnnnnnnnnnnnnnnnnnnnnnnnnnnnnnnnnnnnnnnnnnnnnnnnnnnnnnnnnnnnnnnnnnnnnnnnnnnnnnnnnnnnnnnnnnnnnnnnnnnnnnnnnnnnnnnnnnnnnnnnnnnnnnnnnnnnnnnnnnnnnnnnnnnnnnnnnnnnnnnnnnnnnnnnnnnnnnnnnnnnnnnnnnnnnnnnnnnnnnnnnnnnnnnnnnnnnnnnnnnnnnnnnnnnnnnnnnnnnnnnnnnnnnnnnnnnnnnnnnnnnnnnnnnnnnnnnnnnnnnnnnnnnnnnnnnnnnnnnnnnnnnnnnnnnnnnnnnnnnnnnnnnnnnnnnnnnnnnnnnnnnnnnnnnnnnnnnnnnnnnnnnnnnnnnnnnnnnnnnnnnnnnnnnnnnnnnnnnnnnnnnnnnnnnnnnnnnnnnnnnnnnnnnnnnnnnnnnnnnnnnnnnnnnnnnnnnnnnnnnnnnnnnnnnnnnnnnnnnnnnnnnnnnnnnnnnnnnnnnnnnnnnnnnnnnnnnnnnnnnnnnnnnnnnnnnnnnnnnnnnnnnnnnnnnnnnnnnnnnnnnnnnnnnnnnnnnnnnnnnnnnnnnnnnnnnnnnnnnnnnnnnnnnnnnnnnnnnnnnnnnnnnnnnnnnnnnnnnnnnnnnnnnnnnnnnnnnnnnnnnnnnnnnnnnnnnnnnnnnnnnnnnnnnnnnnnnnnnnnnnnnnnnnnnnnnnnnnnnnnnnnnnnnnnnnnnnnnnnnnnnnnnnnnnnnnnnnnnnnnnnnnnnnnnnnnnnnnnnnnnnnnnnnnnnnnnnnnnnnnnnnnnnnnnnnnnnnnnnnnnnnnnnnnnnnnnnnnnnnnnnnnnnnnnnnnnnnnnnnnnnnnnnnnnnnnnnnnnnnnnnnnnnnnnnnnnnnnnnnnnnnnnnnnnnnnnnnnnnnnnnnnnnnnnnnnnnnnnnnnnnnnnnnnnnnnnnnnnnnnnnnnnnnnnnnnnnnnnnnnnnnnnnnnnnnnnnnnnnnnnnnnnnnnnnnnnnnnnnnnnnnnnnnnnnnnnnnnnnnnnnnnnnnnnnnnnnnnnnnnnnnnnnnnnnnnnnnnnnnnnnnnnnnnnnnnnnnnnnnnnnnnnnnnnnnnnnnnnnnnnnnnnnnnnnnnnnnnnnnnnnnnnnnnnnnnnnnnnnnnnnnnnnnnnnnnnnnnnnnnnnnnnnnnnnnnnnnnnnnnnnnnnnnnnnnnnnnnnnnnnnnnnnnnnnnnnnnnnnnnnnnnnnnnnnnnnnnnnnnnnnnnnnnnnnnnnnnnnnnnnnnnnnnnnnnnnnnnnnnnnnnnnnnnnnnnnnnnnnnnnnnnnnnnnnnnnnnnnnnnnnnnnnnnnnnnnnnnnnnnnnnnnnnnnnnnnnnnnnnnnnnnnnnnnnnnnnnnnnnnnnnnnnnnnnnnnnnnnnnnnnnnnnnnnnnnnnnnnnnnnnnnnnnnnnnnnnnnnnnnnnnnnnnnnnnnnnnnnnnnnnnnnnnnnnnnnnnnnnnnnnnnnnnnnnnnnnnnnnnnnnnnnnnnnnnnnnnnnnnnnnnnnnnnnnnnnnnnnnnnnnnnnnnnnnnnnnnnnnnnnnnnnnnnnnnnnnnnnnnnnnnnnnnnnnnnnnnnnnnnnnnnnnnnnnnnnnnnnnnnnnnnnnnnnnnnnnnnnnnnnnnnnnnnnnnnnnnnnnnnnnnnnnnnnnnnnnnnnnnnnnnnnnnnnnnnnnnnnnnnnnnnnnnnnnnnnnnnnnnnnnnnnnnnnnnnnnnnnnnnnnnnnnnnnnnnnnnnnnnnnnnnnnnnnnnnnnnnnnnnnnnnnnnnnnnnnnnnnnnnnnnnnnnnnnnnnnnnnnnnnnnnnnnnnnnnnnnnnnnnnnnnnnnnnnnnnnnnnnnnnnnnnnnnnnnnnnnnnnnnnnnnnnnnnnnnnnnnnnnnnnnnnnnnnnnnnnnnnnnnnnnnnnnnnnnnnnnnnnnnnnnnnnnnnnnnnnnnnnnnnnnnnnnnnnnnnnnnnnnnnnnnnnnnnnnnnnnnnnnnnnnnnnnnnnnnnnnnnnnnnnnnnnnnnnnnnnnnnnnnnnnnnnnnnnnnnnnnnnnnnnnnnnnnnnnnnnnnnnnnnnnnnnnnnnnnnnnnnnnnnnnnnnnnnnnnnnnnnnnnnnnnnnnnnnnnnnnnnnnnnnnnnnnnnnnnnnnnnnnnnnnnnnnnnnnnnnnnnnnnnnnnnnnnnnnnnnnnnnnnnnnnnnnnnnnnnnnnnnnnnnnnnnnnnnnnnnnnnnnnnnnnnnnnnnnnnnnnnnnnnnnnnnnnnnnnnnnnnnnnnnnnnnnnnnnnnnnnnnnnnnnnnnnnnnnnnnnnnnnnnnnnnnnnnnnnnnnnnnnnnnnnnnnnnnnnnnnnnnnnnnnnnnnnnnnnnnnnnnnnnnnnnnnnnnnnnnnnnnnnnnnnnnnnnnnnnnnnnnnnnnnnnnnnnnnnnnnnnnnnnnnnnnnnnnnnnnnnnnnnnnnnnnnnnnnnnnnnnnnnnnnnnnnnnnnnnnnnnnnnnnnnnnnnnnnnnnnnnnnnnnnnnnnnnnnnnnnnnnnnnnnnnnnnnnnnnnnnnnnnnnnnnnnnnnnnnnnnnnnnnnnnnnnnnnnnnnnnnnnnnnnnnnnnnnnnnnnnnnnnnnnnnnnnnnnnnnnnnnnnnnnnnnnnnnnnnnnnnnnnnnnnnnnnnnnnnnnnnnnnnnnnnnnnnnnnnnnnnnnnnnnnnnnnnnnnnnnnnnnnnnnnnnnnnnnnnnnnnnnnnnnnnnnnnnnnnnnnnnnnnnnnnnnnnnnnnnnnnnnnnnnnnnnnnnnnnnnnnnnnnnnnnnnnnnnnnnnnnnnnnnnnnnnnnnnnnnnnnnnnnnnnnnnnnnnnnnnnnnnnnnnnnnnnnnnnnnnnnnnnnnnnnnnnnnnnnnnnnnnnnnnnnnnnnnnnnnnnnnnnnnnnnnnnnnnnnnnnnnnnnnnnnnnnnnnnnnnnnnnnnnnnnnnnnnnnnnnnnnnnnnnnnnnnnnnnnnnnnnnnnnnnnnnnnnnnnnnnnnnnnnnnnnnnnnnnnnnnnnnnnnnnnnnnnnnnnnnnnnnnnnnnnnnnnnnnnnnnnnnnnnnnnnnnnnnnnnnnnnnnnnnnnnnnnnnnnnnnnnnnnnnnnnnnnnnnnnnnnnnnnnnnnnnnnnnnnnnnnnnnnnnnnnnnnnnnnnnnnnnnnnnnnnnnnnnnnnnnnnnnnnnnnnnnnnnnnnnnnnnnnnnnnnnnnnnnnnnnnnnnnnnnnnnnnnnnnnnnnnnnnnnnnnnnnnnnnnnnnnnnnnnnnnnnnnnnnnnnnnnnnnnnnnnnnnnnnnnnnnnnnnnnnnnnnnnnnnnnnnnnnnnnnnnnnnnnnnnnnnnnnnnnnnnnnnnnnnnnnnnnnnnnnnnnnnnnnnnnnnnnnnnnnnnnnnnnnnnnnnnnnnnnnnnnnnnnnnnnnnnnnnnnnnnnnnnnnnnnnnnnnnnnnnnnnnnnnnnnnnnnnnnnnnnnnnnnnnnnnnnnnnnnnnnnnnnnnnnnnnnnnnnnnnnnnnnnnnnnnnnnnnnnnnnnnnnnnnnnnnnnnnnnnnnnnnnnnnnnnnnnnnnnnnnnnnnnnnnnnnnnnnnnnnnnnnnnnnnnnnnnnnnnnnnnnnnnnnnnnnnnnnnnnnnnnnnnnnnnnnnnnnnnnnnnnnnnnnnnnnnnnnnnnnnnnnnnnnnnnnnnnnnnnnnnnnnnnnnnnnnnnnnnnnnnnnnnnnnnnnnnnnnnnnnnnnnnnnnnnnnnnnnnnnnnnnnnnnnnnnnnnnnnnnnnnnnnnnnnnnnnnnnnnnnnnnnnnnnnnnnnnnnnnnnnnnnnnnnnnnnnnnnnnnnnnnnnnnnnnnnnnnnnnnnnnnnnnnnnnnnnnnnnnnnnnnnnnnnnnnnnnnnnnnnnnnnnnnnnnnnnnnnnnnnnnnnnnnnnnnnnnnnnnnnnnnnnnnnnnnnnnnnnnnnnnnnnnnnnnnnnnnnnnnnnnnnnnnnnnnnnnnnnnnnnnnnnnnnnnnnnnnnnnnnnnnnnnnnnnnnnnnnnnnnnnnnnnnnnnnnnnnnnnnnnnnnnnnnnnnnnnnnnnnnnnnnnnnnnnnnnnnnnnnnnnnnnnnnnnnnnnnnnnnnnnnnnnnnnnnnnnnnnnnnnnnnnnnnnnnnnnnnnnnnnnnnnnnnnnnnnnnnnnnnnnnnnnnnnnnnnnnnnnnnnnnnnnnnnnnnnnnnnnnnnnnnnnnnnnnnnnnnnnnnnnnnnnnnnnnnnnnnnnnnnnnnnnnnnnnnnnnnnnnnnnnnnnnnnnnnnnnnnnnnnnnnnnnnnnnnnnnnnnnnnnnnnnnnnnnnnnnnnnnnnnnnnnnnnnnnnnnnnnnnnnnnnnnnnnnnnnnnnnnnnnnnnnnnnnnnnnnnnnnnnnnnnnnnnnnnnnnnnnnnnnnnnnnnnnnnnnnnnnnnnnnnnnnnnnnnnnnnnnnnnnnnnnnnnnnnnnnnnnnnnnnnnnnnnnnnnnnnnnnnnnnnnnnnnnnnnnnnnnnnnnnnnnnnnnnnnnnnnnnnnnnnnnnnnnnnnnnnnnnnnnnnnnnnnnnnnnnnnnnnnnnnnnnnnnnnnnnnnnnnnnnnnnnnnnnnnnnnnnnnnnnnnnnnnnnnnnnnnnnnnnnnnnnnnnnnnnnnnnnnnnnnnnnnnnnnnnnnnnnnnnnnnnnnnnnnnnnnnnnnnnnnnnnnnnnnnnnnnnnnnnnnnnnnnnnnnnnnnnnnnnnnnnnnnnnnnnnnnnnnnnnnnnnnnnnnnnnnnnnnnnnnnnnnnnnnnnnnnnnnnnnnnnnnnnnnnnnnnnnnnnnnnnnnnnnnnnnnnnnnnnnnnnnnnnnnnnnnnnnnnnnnnnnnnnnnnnnnnnnnnnnnnnnnnnnnnnnnnnnnnnnnnnnnnnnnnnnnnnnnnnnnnnnnnnnnnnnnnnnnnnnnnnnnnnnnnnnnnnnnnnnnnnnnnnnnnnnnnnnnnnnnnnnnnnnnnnnnnnnnnnnnnnnnnnnnnnnnnnnnnnnnnnnnnnnnnnnnnnnnnnnnnnnnnnnnnnnnnnnnnnnnnnnnnnnnnnnnnnnnnnnnnnnnnnnnnnnnnnnnnnnnnnnnnnnnnnnnnnnnnnnnnnnnnnnnnnnnnnnnnnnnnnnnnnnnnnnnnnnnnnnnnnnnnnnnnnnnnnnnnnnnnnnnnnnnnnnnnnnnnnnnnnnnnnnnnnnnnnnnnnnnnnnnnnnnnnnnnnnnnnnnnnnnnnnnnnnnnnnnnnnnnnnnnnnnnnnnnnnnnnnnnnnnnnnnnnnnnnnnnnnnnnnnnnnnnnnnnnnnnnnnnnnnnnnnnnnnnnnnnnnnnnnnnnnnnnnnnnnnnnnnnnnnnnnnnnnnnnnnnnnnnnnnnnnnnnnnnnnnnnnnnnnnnnnnnnnnnnnnnnnnnnnnnnnnnnnnnnnnnnnnnnnnnnnnnnnnnnnnnnnnnnnnnnnnnnnnnnnnnnnnnnnnnnnnnnnnnnnnnnnnnnnnnnnnnnnnnnnnnnnnnnnnnnnnnnnnnnnnnnnnnnnnnnnnnnnnnnnnnnnnnnnnnnnnnnnnnnnnnnnnnnnnnnnnnnnnnnnnnnnnnnnnnnnnnnnnnnnnnnnnnnnnnnnnnnnnnnnnnnnnnnnnnnnnnnnnnnnnnnnnnnnnnnnnnnnnnnnnnnnnnnnnnnnnnnnnnnnnnnnnnnnnnnnnnnnnnnnnnnnnnnnnnnnnnnnnnnnnnnnnnnnnnnnnnnnnnnnnnnnnnnnnnnnnnnnnnnnnnnnnnnnnnnnnnnnnnnnnnnnnnnnnnnnnnnnnnnnnnnnnnnnnnnnnnnnnnnnnnnnnnnnnnnnnnnnnnnnnnnnnnnnnnnnnnnnnnnnnnnnnnnnnnnnnnnnnnnnnnnnnnnnnnnnnnnnnnnnnnnnnnnnnnnnnnnnnnnnnnnnnnnnnnnnnnnnnnnnnnnnnnnnnnnnnnnnnnnnnnnnnnnnnnnnnnnnnnnnnnnnnnnnnnnnnnnnnnnnnnnnnnnnnnnnnnnnnnnnnnnnnnnnnnnnnnnnnnnnnnnnnnnnnnnnnnnnnnnnnnnnnnnnnnnnnnnnnnnnnnnnnnnnnnnnnnnnnnnnnnnnnnnnnnnnnnnnnnnnnnnnnnnnnnnnnnnnnnnnnnnnnnnnnnnnnnnnnnnnnnnnnnnnnnnnnnnnnnnnnnnnnnnnnnnnnnnnnnnnnnnnnnnnnnnnnnnnnnnnnnnnnnnnnnnnnnnnnnnnnnnnnnnnnnnnnnnnnnnnnnnnnnnnnnnnnnnnnnnnnnnnnnnnnnnnnnnnnnnnnnnnnnnnnnnnnnnnnnnnnnnnnnnnnnnnnnnnnnnnnnnnnnnnnnnnnnnnnnnnnnnnnnnnnnnnnnnnnnnnnnnnnnnnnnnnnnnnnnnnnnnnnnnnnnnnnnnnnnnnnnnnnnnnnnnnnnnnnnnnnnnnnnnnnnnnnnnnnnnnnnnnnnnnnnnnnnnnnnnnnnnnnnnnnnnnnnnnnnnnnnnnnnnnnnnnnnnnnnnnnnnnnnnnnnnnnnnnnnnnnnnnnnnnnnnnnnnnnnnnnnnnnnnnnnnnnnnnnnnnnnnnnnnnnnnnnnnnnnnnnnnnnnnnnnnnnnnnnnnnnnnnnnnnnnnnnnnnnnnnnnnnnnnnnnnnnnnnnnnnnnnnnnnnnnnnnnnnnnnnnnnnnnnnnnnnnnnnnnnnnnnnnnnnnnnnnnnnnnnnnnnnnnnnnnnnnnnnnnnnnnnnnnnnnnnnnnnnnnnnnnnnnnnnnnnnnnnnnnnnnnnnnnnnnnnnnnnnnnnnnnnnnnnnnnnnnnnnnnnnnnnnnnnnnnnnnnnnnnnnnnnnnnnnnnnnnnnnnnnnnnnnnnnnnnnnnnnnnnnnnnnnnnnnnnnnnnnnnnnnnnnnnnnnnnnnnnnnnnnnnnnnnnnnnnnnnnnnnnnnnnnnnnnnnnnnnnnnnnnnnnnnnnnnnnnnnnnnnnnnnnnnnnnnnnnnnnnnnnnnnnnnnnnnnnnnnnnnnnnnnnnnnnnnnnnnnnnnnnnnnnnnnnnnnnnnnnnnnnnnnnnnnnnnnnnnnnnnnnnnnnnnnnnnnnnnnnnnnnnnnnnnnnnnnnnnnnnnnnnnnnnnnnnnnnnnnnnnnnnnnnnnnnnnnnnnnnnnnnnnnnnnnnnnnnnnnnnnnnnnnnnnnnnnnnnnnnnnnnnnnnnnnnnnnnnnnnnnnnnnnnnnnnnnnnnnnnnnnnnnnnnnnnnnnnnnnnnnnnnnnnnnnnnnnnnnnnnnnnnnnnnnnnnnnnnnnnnnnnnnnnnnnnnnnnnnnnnnnnnnnnnnnnnnnnnnnnnnnnnnnnnnnnnnnnnnnnnnnnnnnnnnnnnnnnnnnnnnnnnnnnnnnnnnnnnnnnnnnnnnnnnnnnnnnnnnnnnnnnnnnnnnnnnnnnnnnnnnnnnnnnnnnnnnnnnnnnnnnnnnnnnnnnnnnnnnnnnnnnnnnnnnnnnnnnnnnnnnnnnnnnnnnnnnnnnnnnnnnnnnnnnnnnnnnnnnnnnnnnnnnnnnnnnnnnnnnnnnnnnnnnnnnnnnnnnnnnnnnnnnnnnnnnnnnnnnnnnnnnnnnnnnnnnnnnnnnnnnnnnnnnnnnnnnnnnnnnnnnnnnnnnnnnnnnnnnnnnnnnnnnnnnnnnnnnnnnnnnnnnnnnnnnnnnnnnnnnnnnnnnnnnnnnnnnnnnnnnnnnnnnnnnnnnnnnnnnnnnnnnnnnnnnnnnnnnnnnnnnnnnnnnnnnnnnnnnnnnnnnnnnnnnnnnnnnnnnnnnnnnnnnnnnnnnnnnnnnnnnnnnnnnnnnnnnnnnnnnnnnnnnnnnnnnnnnnnnnnnnnnnnnnnnnnnnnnnnnnnnnnnnnnnnnnnnnnnnnnnnnnnnnnnnnnnnnnnnnnnnnnnnnnnnnnnnnnnnnnnnnnnnnnnnnnnnnnnnnnnnnnnnnnnnnnnnnnnnnnnnnnnnnnnnnnnnnnnnnnnnnnnnnnnnnnnnnnnnnnnnnnnnnnnnnnnnnnnnnnnnnnnnnnnnnnnnnnnnnnnnnnnnnnnnnnnnnnnnnnnnnnnnnnnnnnnnnnnnnnnnnnnnnnnnnnnnnnnnnnnnnnnnnnnnnnnnnnnnnnnnnnnnnnnnnnnnnnnnnnnnnnnnnnnnnnnnnnnnnnnnnnnnnnnnnnnnnnnnnnnnnnnnnnnnnnnnnnnnnnnnnnnnnnnnnnnnnnnnnnnnnnnnnnnnnnnnnnnnnnnnnnnnnnnnnnnnnnnnnnnnnnnnnnnnnnnnnnnnnnnnnnnnnnnnnnnnnnnnnnnnnnnnnnnnnnnnnnnnnnnnnnnnnnnnnnnnnnnnnnnnnnnnnnnnnnnnnnnnnnnnnnnnnnnnnnnnnnnnnnnnnnnnnnnnnnnnnnnnnnnnnnnnnnnnnnnnnnnnnnnnnnnnnnnnnnnnnnnnnnnnnnnnnnnnnnnnnnnnnnnnnnnnnnnnnnnnnnnnnnnnnnnnnnnnnnnnnnnnnnnnnnnnnnnnnnnnnnnnnnnnnnnnnnnnnnnnnnnnnnnnnnnnnnnnnnnnnnnnnnnnnnnnnnnnnnnnnnnnnnnnnnnnnnnnnnnnnnnnnnnnnnnnnnnnnnnnnnnnnnnnnnnnnnnnnnnnnnnnnnnnnnnnnnnnnnnnnnnnnnnnnnnnnnnnnnnnnnnnnnnnnnnnnnnnnnnnnnnnnnnnnnnnnnnnnnnnnnnnnnnnnnnnnnnnnnnnnnnnnnnnnnnnnnnnnnnnnnnnnnnnnnnnnnnnnnnnnnnnnnnnnnnnnnnnnnnnnnnnnnnnnnnnnnnnnnnnnnnnnnnnnnnnnnnnnnnnnnnnnnnnnnnnnnnnnnnnnnnnnnnnnnnnnnnnnnnnnnnnnnnnnnnnnnnnnnnnnnnnnnnnnnnnnnnnnnnnnnnnnnnnnnnnnnnnnnnnnnnnnnnnnnnnnnnnnnnnnnnnnnnnnnnnnnnnnnnnnnnnnnnnnnnnnnnnnnnnnnnnnnnnnnnnnnnnnnnnnnnnnnnnnnnnnnnnnnnnnnnnnnnnnnnnnnnnnnnnnnnnnnnnnnnnnnnnnnnnnnnnnnnnnnnnnnnnnnnnnnnnnnnnnnnnnnnnnnnnnnnnnnnnnnnnnnnnnnnnnnnnnnnnnnnnnnnnnnnnnnnnnnnnnnnnnnnnnnnnnnnnnnnnnnnnnnnnnnnnnnnnnnnnnnnnnnnnnnnnnnnnnnnnnnnnnnnnnnnnnnnnnnnnnnnnnnnnnnnnnnnnnnnnnnnnnnnnnnnnnnnnnnnnnnnnnnnnnnnnnnnnnnnnnnnnnnnnnnnnnnnnnnnnnnnnnnnnnnnnnnnnnnnnnnnnnnnnnnnnnnnnnnnnnnnnnnnnnnnnnnnnnnnnnnnnnnnnnnnnnnnnnnnnnnnnnnnnnnnnnnnnnnnnnnnnnnnnnnnnnnnnnnnnnnnnnnnnnnnnnnnnnnnnnnnnnnnnnnnnnnnnnnnnnnnnnnnnnnnnnnnnnnnnnnnnnnnnnnnnnnnnnnnnnnnnnnnnnnnnnnnnnnnnnnnnnnnnnnnnnnnnnnnnnnnnnnnnnnnnnnnnnnnnnnnnnnnnnnnnnnnnnnnnnnnnnnnnnnnnnnnnnnnnnnnnnnnnnnnnnnnnnnnnnnnnnnnnnnnnnnnnnnnnnnnnnnnnnnnnnnnnnnnnnnnnnnnnnnnnnnnnnnnnnnnnnnnnnnnnnnnnnnnnnnnnnnnnnnnnnnnnnnnnnnnnnnnnnnnnnnnnnnnnnnnnnnnnnnnnnnnnnnnnnnnnnnnnnnnnnnnnnnnnnnnnnnnnnnnnnnnnnnnnnnnnnnnnnnnnnnnnnnnnnnnnnnnnnnnnnnnnnnnnnnnnnnnnnnnnnnnnnnnnnnnnnnnnnnnnnnnnnnnnnnnnnnnnnnnnnnnnnnnnnnnnnnnnnnnnnnnnnnnnnnnnnnnnnnnnnnnnnnnnnnnnnnnnnnnnnnnnnnnnnnnnnnnnnnnnnnnnnnnnnnnnnnnnnnnnnnnnnnnnnnnnnnnnnnnnnnnnnnnnnnnnnnnnnnnnnnnnnnnnnnnnnnnnnnnnnnnnnnnnnnnnnnnnnnnnnnnnnnnnnnnnnnnnnnnnnnnnnnnnnnnnnnnnnnnnnnnnnnnnnnnnnnnnnnnnnnnnnnnnnnnnnnnnnnnnnnnnnnnnnnnnnnnnnnnnnnnnnnnnnnnnnnnnnnnnnnnnnnnnnnnnnnnnnnnnnnnnnnnnnnnnnnnnnnnnnnnnnnnnnnnnnnnnnnnnnnnnnnnnnnnnnnnnnnnnnnnnnnnnnnnnnnnnnnnnnnnnnnnnnnnnnnnnnnnnnnnnnnnnnnnnnnnnnnnnnnnnnnnnnnnnnnnnnnnnnnnnnnnnnnnnnnnnnnnnnnnnnnnnnnnnnnnnnnnnnnnnnnnnnnnnnnnnnnnnnnnnnnnnnnnnnnnnnnnnnnnnnnnnnnnnnnnnnnnnnnnnnnnnnnnnnnnnnnnnnnnnnnnnnnnnnnnnnnnnnnnnnnnnnnnnnnnnnnnnnnnnnnnnnnnnnnnnnnnnnnnnnnnnnnnnnnnnnnnnnnnnnnnnnnnnnnnnnnnnnnnnnnnnnnnnnnnnnnnnnnnnnnnnnnnnnnnnnnnnnnnnnnnnnnnnnnnnnnnnnnnnnnnnnnnnnnnnnnnnnnnnnnnnnnnnnnnnnnnnnnnnnnnnnnnnnnnnnnnnnnnnnnnnnnnnnnnnnnnnnnnnnnnnnnnnnnnnnnnnnnnnnnnnnnnnnnnnnnnnnnnnnnnnnnnnnnnnnnnnnnnnnnnnnnnnnnnnnnnnnnnnnnnnnnnnnnnnnnnnnnnnnnnnnnnnnnnnnnnnnnnnnnnnnnnnnnnnnnnnnnnnnnnnnnnnnnnnnnnnnnnnnnnnnnnnnnnnnnnnnnnnnnnnnnnnnnnnnnnnnnnnnnnnnnnnnnnnnnnnnnnnnnnnnnnnnnnnnnnnnnnnnnnnnnnnnnnnnnnnnnnnnnnnnnnnnnnnnnnnnnnnnnnnnnnnnnnnnnnnnnnnnnnnnnnnnnnnnnnnnnnnnnnnnnnnnnnnnnnnnnnnnnnnnnnnnnnnnnnnnnnnnnnnnnnnnnnnnnnnnnnnnnnnnnnnnnnnnnnnnnnnnnnnnnnnnnnnnnnnnnnnnnnnnnnnnnnnnnnnnnnnnnnnnnnnnnnnnnnnnnnnnnnnnnnnnnnnnnnnnnnnnnnnnnnnnnnnnnnnnnnnnnnnnnnnnnnnnnnnnnnnnnnnnnnnnnnnnnnnnnnnnnnnnnnnnnnnnnnnnnnnnnnnnnnnnnnnnnnnnnnnnnnnnnnnnnnnnnnnnnnnnnnnnnnnnnnnnnnnnnnnnnnnnnnnnnnnnnnnnnnnnnnnnnnnnnnnnnnnnnnnnnnnnnnnnnnnnnnnnnnnnnnnnnnnnnnnnnnnnnnnnnnnnnnnnnnnnnnnnnnnnnnnnnnnnnnnnnnnnnnnnnnnnnnnnnnnnnnnnnnnnnnnnnnnnnnnnnnnnnnnnnnnnnnnnnnnnnnnnnnnnnnnnnnnnnnnnnnnnnnnnnnnnnnnnnnnnnnnnnnnnnnnnnnnnnnnnnnnnnnnnnnnnnnnnnnnnnnnnnnnnnnnnnnnnnnnnnnnnnnnnnnnnnnnnnnnnnnnnnnnnnnnnnnnnnnnnnnnnnnnnnnnnnnnnnnnnnnnnnnnnnnnnnnnnnnnnnnnnnnnnnnnnnnnnnnnnnnnnnnnnnnnnnnnnnnnnnnnnnnnnnnnnnnnnnnnnnnnnnnnnnnnnnnnnnnnnnnnnnnnnnnnnnnnnnnnnnnnnnnnnnnnnnnnnnnnnnnnnnnnnnnnnnnnnnnnnnnnnnnnnnnnnnnnnnnnnnnnnnnnnnnnnnnnnnnnnnnnnnnnnnnnnnnnnnnnnnnnnnnnnnnnnnnnnnnnnnnnnnnnnnnnnnnnnnnnnnnnnnnnnnnnnnnnnnnnnnnnnnnnnnnnnnnnnnnnnnnnnnnnnnnnnnnnnnnnnnnnnnnnnnnnnnnnnnnnnnnnnnnnnnnnnnnnnnnnnnnnnnnnnnnnnnnnnnnnnnnnnnnnnnnnnnnnnnnnnnnnnnnnnnnnnnnnnnnnnnnnnnnnnnnnnnnnnnnnnnnnnnnnnnnnnnnnnnnnnnnnnnnnnnnnnnnnnnnnnnnnnnnnnnnnnnnnnnnnnnnnnnnnnnnnnnnnnnnnnnnnnnnnnnnnnnnnnnnnnnnnnnnnnnnnnnnnnnnnnnnnnnnnnnnnnnnnnnnnnnnnnnnnnnnnnnnnnnnnnnnnnnnnnnnnnnnnnnnnnnnnnnnnnnnnnnnnnnnnnnnnnnnnnnnnnnnnnnnnnnnnnnnnnnnnnnnnnnnnnnnnnnnnnnnnnnnnnnnnnnnnnnnnnnnnnnnnnnnnnnnnnnnnnnnnnnnnnnnnnnnnnnnnnnnnnnnnnnnnnnnnnnnnnnnnnnnnnnnnnnnnnnnnnnnnnnnnnnnnnnnnnnnnnnnnnnnnnnnnnnnnnnnnnnnnnnnnnnnnnnnnnnnnnnnnnnnnnnnnnnnnnnnnnnnnnnnnnnnnnnnnnnnnnnnnnnnnnnnnnnnnnnnnnnnnnnnnnnnnnnnnnnnnnnnnnnnnnnnnnnnnnnnnnnnnnnnnnnnnnnnnnnnnnnnnnnnnnnnnnnnnnnnnnnnnnnnnnnnnnnnnnnnnnnnnnnnnnnnnnnnnnnnnnnnnnnnnnnnnnnnnnnnnnnnnnnnnnnnnnnnnnnnnnnnnnnnnnnnnnnnnnnnnnnnnnnnnnnnnnnnnnnnnnnnnnnnnnnnnnnnnnnnnnnnnnnnnnnnnnnnnnnnnnnnnnnnnnnnnnnnnnnnnnnnnnnnnnnnnnnnnnnnnnnnnnnnnnnnnnnnnnnnnnnnnnnnnnnnnnnnnnnnnnnnnnnnnnnnnnnnnnnnnnnnnnnnnnnnnnnnnnnnnnnnnnnnnnnnnnnnnnnnnnnnnnnnnnnnnnnnnnnnnnnnnnnnnnnnnnnnnnnnnnnnnnnnnnnnnnnnnnnnnnnnnnnnnnnnnnnnnnnnnnnnnnnnnnnnnnnnnnnnnnnnnnnnnnnnnnnnnnnnnnnnnnnnnnnnnnnnnnnnnnnnnnnnnnnnnnnnnnnnnnnnnnnnnnnnnnnnnnnnnnnnnnnnnnnnnnnnnnnnnnnnnnnnnnnnnnnnnnnnnnnnnnnnnnnnnnnnnnnnnnnnnnnnnnnnnnnnnnnnnnnnnnnnnnnnnnnnnnnnnnnnnnnnnnnnnnnnnnnnnnnnnnnnnnnnnnnnnnnnnnnnnnnnnnnnnnnnnnnnnnnnnnnnnnnnnnnnnnnnnnnnnnnnnnnnnnnnnnnnnnnnnnnnnnnnnnnnnnnnnnnnnnnnnnnnnnnnnnnnnnnnnnnnnnnnnnnnnnnnnnnnnnnnnnnnnnnnnnnnnnnnnnnnnnnnnnnnnnnnnnnnnnnnnnnnnnnnnnnnnnnnnnnnnnnnnnnnnnnnnnnnnnnnnnnnnnnnnnnnnnnnnnnnnnnnnnnnnnnnnnnnnnnnnnnnnnnnnnnnnnnnnnnnnnnnnnnnnnnnnnnnnnnnnnnnnnnnnnnnnnnnnnnnnnnnnnnnnnnnnnnnnnnnnnnnnnnnnnnnnnnnnnnnnnnnnnnnnnnnnnnnnnnnnnnnnnnnnnnnnnnnnnnnnnnnnnnnnnnnnnnnnnnnnnnnnnnnnnnnnnnnnnnnnnnnnnnnnnnnnnnnnnnnnnnnnnnnnnnnnnnnnnnnnnnnnnnnnnnnnnnnnnnnnnnnnnnnnnnnnnnnnnnnnnnnnnnnnnnnnnnnnnnnnnnnnnnnnnnnnnnnnnnnnnnnnnnnnnnnnnnnnnnnnnnnnnnnnnnnnnnnnnnnnnnnnnnnnnnnnnnnnnnnnnnnnnnnnnnnnnnnnnnnnnnnnnnnnnnnnnnnnnnnnnnnnnnnnnnnnnnnnnnnnnnnnnnnnnnnnnnnnnnnnnnnnnnnnnnnnnnnnnnnnnnnnnnnnnnnnnnnnnnnnnnnnnnnnnnnnnnnnnnnnnnnnnnnnnnnnnnnnnnnnnnnnnnnnnnnnnnnnnnnnnnnnnnnnnnnnnnnnnnnnnnnnnnnnnnnnnnnnnnnnnnnnnnnnnnnnnnnnnnnnnnnnnnnnnnnnnnnnnnnnnnnnnnnnnnnnnnnnnnnnnnnnnnnnnnnnnnnnnnnnnnnnnnnnnnnnnnnnnnnnnnnnnnnnnnnnnnnnnnnnnnnnnnnnnnnnnnnnnnnnnnnnnnnnnnnnnnnnnnnnnnnnnnnnnnnnnnnnnnnnnnnnnnnnnnnnnnnnnnnnnnnnnnnnnnnnnnnnnnnnnnnnnnnnnnnnnnnnnnnnnnnnnnnnnnnnnnnnnnnnnnnnnnnnnnnnnnnnnnnnnnnnnnnnnnnnnnnnnnnnnnnnnnnnnnnnnnnnnnnnnnnnnnnnnnnnnnnnnnnnnnnnnnnnnnnnnnnnnnnnnnnnnnnnnnnnnnnnnnnnnnnnnnnnnnnnnnnnnnnnnnnnnnnnnnnnnnnnnnnnnnnnnnnnnnnnnnnnnnnnnnnnnnnnnnnnnnnnnnnnnnnnnnnnnnnnnnnnnnnnnnnnnnnnnnnnnnnnnnnnnnnnnnnnnnnnnnnnnnnnnnnnnnnnnnnnnnnnnnnnnnnnnnnnnnnnnnnnnnnnnnnnnnnnnnnnnnnnnnnnnnnnnnnnnnnnnnnnnnnnnnnnnnnnnnnnnnnnnnnnnnnnnnnnnnnnnnnnnnnnnnnnnnnnnnnnnnnnnnnnnnnnnnnnnnnnnnnnnnnnnnnnnnnnnnnnnnnnnnnnnnnnnnnnnnnnnnnnnnnnnnnnnnnnnnnnnnnnnnnnnnnnnnnnnnnnnnnnnnnnnnnnnnnnnnnnnnnnnnnnnnnnnnnnnnnnnnnnnnnnnnnnnnnnnnnnnnnnnnnnnnnnnnnnnnnnnnnnnnnnnnnnnnnnnnnnnnnnnnnnnnnnnnnnnnnnnnnnnnnnnnnnnnnnnnnnnnnnnnnnnnnnnnnnnnnnnnnnnnnnnnnnnnnnnnnnnnnnnnnnnnnnnnnnnnnnnnnnnnnnnnnnnnnnnnnnnnnnnnnnnnnnnnnnnnnnnnnnnnnnnnnnnnnnnnnnnnnnnnnnnnnnnnnnnnnnnnnnnnnnnnnnnnnnnnnnnnnnnnnnnnnnnnnnnnnnnnnnnnnnnnnnnnnnnnnnnnnnnnnnnnnnnnnnnnnnnnnnnnnnnnnnnnnnnnnnnnnnnnnnnnnnnnnnnnnnnnnnnnnnnnnnnnnnnnnnnnnnnnnnnnnnnnnnnnnnnnnnnnnnnnnnnnnnnnnnnnnnnnnnnnnnnnnnnnnnnnnnnnnnnnnnnnnnnnnnnnnnnnnnnnnnnnnnnnnnnnnnnnnnnnnnnnnnnnnnnnnnnnnnnnnnnnnnnnnnnnnnnnnnnnnnnnnnnnnnnnnnnnnnnnnnnnnnnnnnnnnnnnnnnnnnnnnnnnnnnnnnnnnnnnnnnnnnnnnnnnnnnnnnnnnnnnnnnnnnnnnnnnnnnnnnnnnnnnnnnnnnnnnnnnnnnnnnnnnnnnnnnnnnnnnnnnnnnnnnnnnnnnnnnnnnnnnnnnnnnnnnnnnnnnnnnnnnnnnnnnnnnnnnnnnnnnnnnnnnnnnnnnnnnnnnnnnnnnnnnnnnnnnnnnnnnnnnnnnnnnnnnnnnnnnnnnnnnnnnnnnnnnnnnnnnnnnnnnnnnnnnnnnnnnnnnnnnnnnnnnnnnnnnnnnnnnnnnnnnnnnnnnnnnnnnnnnnnnnnnnnnnnnnnnnnnnnnnnnnnnnnnnnnnnnnnnnnnnnnnnnnnnnnnnnnnnnnnnnnnnnnnnnnnnnnnnnnnnnnnnnnnnnnnnnnnnnnnnnnnnnnnnnnnnnnnnnnnnnnnnnnnnnnnnnnnnnnnnnnnnnnnnnnnnnnnnnnnnnnnnnnnnnnnnnnnnnnnnnnnnnnnnnnnnnnnnnnnnnnnnnnnnnnnnnnnnnnnnnnnnnnnnnnnnnnnnnnnnnnnnnnnnnnnnnnnnnnnnnnnnnnnnnnnnnnnnnnnnnnnnnnnnnnnnnnnnnnnnnnnnnnnnnnnnnnnnnnnnnnnnnnnnnnnnnnnnnnnnnnnnnnnnnnnnnnnnnnnnnnnnnnnnnnnnnnnnnnnnnnnnnnnnnnnnnnnnnnnnnnnnnnnnnnnnnnnnnnnnnnnnnnnnnnnnnnnnnnnnnnnnnnnnnnnnnnnnnnnnnnnnnnnnnnnnnnnnnnnnnnnnnnnnnnnnnnnnnnnnnnnnnnnnnnnnnnnnnnnnnnnnnnnnnnnnnnnnnnnnnnnnnnnnnnnnnnnnnnnnnnnnnnnnnnnnnnnnnnnnnnnnnnnnnnnnnnnnnnnnnnnnnnnnnnnnnnnnnnnnnnnnnnnnnnnnnnnnnnnnnnnnnnnnnnnnnnnnnnnnnnnnnnnnnnnnnnnnnnnnnnnnnnnnnnnnnnnnnnnnnnnnnnnnnnnnnnnnnnnnnnnnnnnnnnnnnnnnnnnnnnnnnnnnnnnnnnnnnnnnnnnnnnnnnnnnnnnnnnnnnnnnnnnnnnnnnnnnnnnnnnnnnnnnnnnnnnnnnnnnnnnnnnnnnnnnnnnnnnnnnnnnnnnnnnnnnnnnnnnnnnnnnnnnnnnnnnnnnnnnnnnnnnnnnnnnnnnnnnnnnnnnnnnnnnnnnnnnnnnnnnnnnnnnnnnnnnnnnnnnnnnnnnnnnnnnnnnnnnnnnnnnnnnnnnnnnnnnnnnnnnnnnnnnnnnnnnnnnnnnnnnnnnnnnnnnnnnnnnnnnnnnnnnnnnnnnnnnnnnnnnnnnnnnnnnnnnnnnnnnnnnnnnnnnnnnnnnnnnnnnnnnnnnnnnnnnnnnnnnnnnnnnnnnnnnnnnnnnnnnnnnnnnnnnnnnnnnnnnnnnnnnnnnnnnnnnnnnnnnnnnnnnnnnnnnnnnnnnnnnnnnnnnnnnnnnnnnnnnnnnnnnnnnnnnnnnnnnnnnnnnnnnnnnnnnnnnnnnnnnnnnnnnnnnnnnnnnnnnnnnnnnnnnnnnnnnnnnnnnnnnnnnnnnnnnnnnnnnnnnnnnnnnnnnnnnnnnnnnnnnnnnnnnnnnnnnnnnnnnnnnnnnnnnnnnnnnnnnnnnnnnnnnnnnnnnnnnnnnnnnnnnnnnnnnnnnnnnnnnnnnnnnnnnnnnnnnnnnnnnnnnnnnnnnnnnnnnnnnnnnnnnnnnnnnnnnnnnnnnnnnnnnnnnnnnnnnnnnnnnnnnnnnnnnnnnnnnnnnnnnnnnnnnnnnnnnnnnnnnnnnnnnnnnnnnnnnnnnnnnnnnnnnnnnnnnnnnnnnnnnnnnnnnnnnnnnnnnnnnnnnnnnnnnnnnnnnnnnnnnnnnnnnnnnnnnnnnnnnnnnnnnnnnnnnnnnnnnnnnnnnnnnnnnnnnnnnnnnnnnnnnnnnnnnnnnnnnnnnnnnnnnnnnnnnnnnnnnnnnnnnnnnnnnnnnnnnnnnnnnnnnnnnnnnnnnnnnnnnnnnnnnnnnnnnnnnnnnnnnnnnnnnnnnnnnnnnnnnnnnnnnnnnnnnnnnnnnnnnnnnnnnnnnnnnnnnnnnnnnnnnnnnnnnnnnnnnnnnnnnnnnnnnnnnnnnnnnnnnnnnnnnnnnnnnnnnnnnnnnnnnnnnnnnnnnnnnnnnnnnnnnnnnnnnnnnnnnnnnnnnnnnnnnnnnnnnnnnnnnnnnnnnnnnnnnnnnnnnnnnnnnnnnnnnnnnnnnnnnnnnnnnnnnnnnnnnnnnnnnnnnnnnnnnnnnnnnnnnnnnnnnnnnnnnnnnnnnnnnnnnnnnnnnnnnnnnnnnnnnnnnnnnnnnnnnnnnnnnnnnnnnnnnnnnnnnnnnnnnnnnnnnnnnnnnnnnnnnnnnnnnnnnnnnnnnnnnnnnnnnnnnnnnnnnnnnnnnnnnnnnnnnnnnnnnnnnnnnnnnnnnnnnnnnnnnnnnnnnnnnnnnnnnnnnnnnnnnnnnnnnnnnnnnnnnnnnnnnnnnnnnnnnnnnnnnnnnnnnnnnnnnnnnnnnnnnnnnnnnnnnnnnnnnnnnnnnnnnnnnnnnnnnnnnnnnnnnnnnnnnnnnnnnnnnnnnnnnnnnnnnnnnnnnnnnnnnnnnnnnnnnnnnnnnnnnnnnnnnnnnnnnnnnnnnnnnnnnnnnnnnnnnnnnnnnnnnnnnnnnnnnnnnnnnnnnnnnnnnnnnnnnnnnnnnnnnnnnnnnnnnnnnnnnnnnnnnnnnnnnnnnnnnnnnnnnnnnnnnnnnnnnnnnnnnnnnnnnnnnnnnnnnnnnnnnnnnnnnnnnnnnnnnnnnnnnnnnnnnnnnnnnnnnnnnnnnnnnnnnnnnnnnnnnnnnnnnnnnnnnnnnnnnnnnnnnnnnnnnnnnnnnnnnnnnnnnnnnnnnnnnnnnnnnnnnnnnnnnnnnnnnnnnnnnnnnnnnnnnnnnnnnnnnnnnnnnnnnnnnnnnnnnnnnnnnnnnnnnnnnnnnnnnnnnnnnnnnnnnnnnnnnnnnnnnnnnnnnnnnnnnnnnnnnnnnnnnnnnnnnnnnnnnnnnnnnnnnnnnnnnnnnnnnnnnnnnnnnnnnnnnnnnnnnnnnnnnnnnnnnnnnnnnnnnnnnnnnnnnnnnnnnnnnnnnnnnnnnnnnnnnnnnnnnnnnnnnnnnnnnnnnnnnnnnnnnnnnnnnnnnnnnnnnnnnnnnnnnnnnnnnnnnnnnnnnnnnnnnnnnnnnnnnnnnnnnnnnnnnnnnnnnnnnnnnnnnnnnnnnnnnnnnnnnnnnnnnnnnnnnnnnnnnnnnnnnnnnnnnnnnnnnnnnnnnnnnnnnnnnnnnnnnnnnnnnnnnnnnnnnnnnnnnnnnnnnnnnnnnnnnnnnnnnnnnnnnnnnnnnnnnnnnnnnnnnnnnnnnnnnnnnnnnnnnnnnnnnnnnnnnnnnnnnnnnnnnnnnnnnnnnnnnnnnnnnnnnnnnnnnnnnnnnnnnnnnnnnnnnnnnnnnnnnnnnnnnnnnnnnnnnnnnnnnnnnnnnnnnnnnnnnnnnnnnnnnnnnnnnnnnnnnnnnnnnnnnnnnnnnnnnnnnnnnnnnnnnnnnnnnnnnnnnnnnnnnnnnnnnnnnnnnnnnnnnnnnnnnnnnnnnnnnnnnnnnnnnnnnnnnnnnnnnnnnnnnnnnnnnnnnnnnnnnnnnnnnnnnnnnnnnnnnnnnnnnnnnnnnnnnnnnnnnnnnnnnnnnnnnnnnnnnnnnnnnnnnnnnnnnnnnnnnnnnnnnnnnnnnnnnnnnnnnnnnnnnnnnnnnnnnnnnnnnnnnnnnnnnnnnnnnnnnnnnnnnnnnnnnnnnnnnnnnnnnnnnnnnnnnnnnnnnnnnnnnnnnnnnnnnnnnnnnnnnnnnnnnnnnnnnnnnnnnnnnnnnnnnnnnnnnnnnnnnnnnnnnnnnnnnnnnnnnnnnnnnnnnnnnnnnnnnnnnnnnnnnnnnnnnnnnnnnnnnnnnnnnnnnnnnnnnnnnnnnnnnnnnnnnnnnnnnnnnnnnnnnnnnnnnnnnnnnnnnnnnnnnnnnnnnnnnnnnnnnnnnnnnnnnnnnnnnnnnnnnnnnnnnnnnnnnnnnnnnnnnnnnnnnnnnnnnnnnnnnnnnnnnnnnnnnnnnnnnnnnnnnnnnnnnnnnnnnnnnnnnnnnnnnnnnnnnnnnnnnnnnnnnnnnnnnnnnnnnnnnnnnnnnnnnnnnnnnnnnnnnnnnnnnnnnnnnnnnnnnnnnnnnnnnnnnnnnnnnnnnnnnnnnnnnnnnnnnnnnnnnnnnnnnnnnnnnnnnnnnnnnnnnnnnnnnnnnnnnnnnnnnnnnnnnnnnnnnnnnnnnnnnnnnnnnnnnnnnnnnnnnnnnnnnnnnnnnnnnnnnnnnnnnnnnnnnnnnnnnnnnnnnnnnnnnnnnnnnnnnnnnnnnnnnnnnnnnnnnnnnnnnnnnnnnnnnnnnnnnnnnnnnnnnnnnnnnnnnnnnnnnnnnnnnnnnnnnnnnnnnnnnnnnnnnnnnnnnnnnnnnnnnnnnnnnnnnnnnnnnnnnnnnnnnnnnnnnnnnnnnnnnnnnnnnnnnnnnnnnnnnnnnnnnnnnnnnnnnnnnnnnnnnnnnnnnnnnnnnnnnnnnnnnnnnnnnnnnnnnnnnnnnnnnnnnnnnnnnnnnnnnnnnnnnnnnnnnnnnnnnnnnnnnnnnnnnnnnnnnnnnnnnnnnnnnnnnnnnnnnnnnnnnnnnnnnnnnnnnnnnnnnnnnnnnnnnnnnnnnnnnnnnnnnnnnnnnnnnnnnnnnnnnnnnnnnnnnnnnnnnnnnnnnnnnnnnnnnnnnnnnnnnnnnnnnnnnnnnnnnnnnnnnnnnnnnnnnnnnnnnnnnnnnnnnnnnnnnnnnnnnnnnnnnnnnnnnnnnnnnnnnnnnnnnnnnnnnnnnnnnnnnnnnnnnnnnnnnnnnnnnnnnnnnnnnnnnnnnnnnnnnnnnnnnnnnnnnnnnnnnnnnnnnnnnnnnnnnnnnnnnnnnnnnnnnnnnnnnnnnnnnnnnnnnnnnnnnnnnnnnnnnnnnnnnnnnnnnnnnnnnnnnnnnnnnnnnnnnnnnnnnnnnnnnnnnnnnnnnnnnnnnnnnnnnnnnnnnnnnnnnnnnnnnnnnnnnnnnnnnnnnnnnnnnnnnnnnnnnnnnnnnnnnnnnnnnnnnnnnnnnnnnnnnnnnnnnnnnnnnnnnnnnnnnnnnnnnnnnnnnnnnnnnnnnnnnnnnnnnnnnnnnnnnnnnnnnnnnnnnnnnnnnnnnnnnnnnnnnnnnnnnnnnnnnnnnnnnnnnnnnnnnnnnnnnnnnnnnnnnnnnnnnnnnnnnnnnnnnnnnnnnnnnnnnnnnnnnnnnnnnnnnnnnnnnnnnnnnnnnnnnnnnnnnnnnnnnnnnnnnnnnnnnnnnnnnnnnnnnnnnnnnnnnnnnnnnnnnnnnnnnnnnnnnnnnnnnnnnnnnnnnnnnnnnnnnnnnnnnnnnnnnnnnnnnnnnnnnnnnnnnnnnnnnnnnnnnnnnnnnnnnnnnnnnnnnnnnnnnnnnnnnnnnnnnnnnnnnnnnnnnnnnnnnnnnnnnnnnnnnnnnnnnnnnnnnnnnnnnnnnnnnnnnnnnnnnnnnnnnnnnnnnnnnnnnnnnnnnnnnnnnnnnnnnnnnnnnnnnnnnnnnnnnnnnnnnnnnnnnnnnnnnnnnnnnnnnnnnnnnnnnnnnnnnnnnnnnnnnnnnnnnnnnnnnnnnnnnnnnnnnnnnnnnnnnnnnnnnnnnnnnnnnnnnnnnnnnnnnnnnnnnnnnnnnnnnnnnnnnnnnnnnnnnnnnnnnnnnnnnnnnnnnnnnnnnnnnnnnnnnnnnnnnnnnnnnnnnnnnnnnnnnnnnnnnnnnnnnnnnnnnnnnnnnnnnnnnnnnnnnnnnnnnnnnnnnnnnnnnnnnnnnnnnnnnnnnnnnnnnnnnnnnnnnnnnnnnnnnnnnnnnnnnnnnnnnnnnnnnnnnnnnnnnnnnnnnnnnnnnnnnnnnnnnnnnnnnnnnnnnnnnnnnnnnnnnnnnnnnnnnnnnnnnnnnnnnnnnnnnnnnnnnnnnnnnnnnnnnnnnnnnnnnnnnnnnnnnnnnnnnnnnnnnnnnnnnnnnnnnnnnnnnnnnnnnnnnnnnnnnnnnnnnnnnnnnnnnnnnnnnnnnnnnnnnnnnnnnnnnnnnnnnnnnnnnnnnnnnnnnnnnnnnnnnnnnnnnnnnnnnnnnnnnnnnnnnnnnnnnnnnnnnnnnnnnnnnnnnnnnnnnnnnnnnnnnnnnnnnnnnnnnnnnnnnnnnnnnnnnnnnnnnnnnnnnnnnnnnnnnnnnnnnnnnnnnnnnnnnnnnnnnnnnnnnnnnnnnnnnnnnnnnnnnnnnnnnnnnnnnnnnnnnnnnnnnnnnnnnnnnnnnnnnnnnnnnnnnnnnnnnnnnnnnnnnnnnnnnnnnnnnnnnnnnnnnnnnnnnnnnnnnnnnnnnnnnnnnnnnnnnnnnnnnnnnnnnnnnnnnnnnnnnnnnnnnnnnnnnnnnnnnnnnnnnnnnnnnnnnnnnnnnnnnnnnnnnnnnnnnnnnnnnnnnnnnnnnnnnnnnnnnnnnnnnnnnnnnnnnnnnnnnnnnnnnnnnnnnnnnnnnnnnnnnnnnnnnnnnnnnnnnnnnnnnnnnnnnnnnnnnnnnnnnnnnnnnnnnnnnnnnnnnnnnnnnnnnnnnnnnnnnnnnnnnnnnnnnnnnnnnnnnnnnnnnnnnnnnnnnnnnnnnnnnnnnnnnnnnnnnnnnnnnnnnnnnnnnnnnnnnnnnnnnnnnnnnnnnnnnnnnnnnnnnnnnnnnnnnnnnnnnnnnnnnnnnnnnnnnnnnnnnnnnnnnnnnnnnnnnnnnnnnnnnnnnnnnnnnnnnnnnnnnnnnnnnnnnnnnnnnnnnnnnnnnnnnnnnnnnnnnnnnnnnnnnnnnnnnnnnnnnnnnnnnnnnnnnnnnnnnnnnnnnnnnnnnnnnnnnnnnnnnnnnnnnnnnnnnnnnnnnnnnnnnnnnnnnnnnnnnnnnnnnnnnnnnnnnnnnnnnnnnnnnnnnnnnnnnnnnnnnnnnnnnnnnnnnnnnnnnnnnnnnnnnnnnnnnnnnnnnnnnnnnnnnnnnnnnnnnnnnnnnnnnnnnnnnnnnnnnnnnnnnnnnnnnnnnnnnnnnnnnnnnnnnnnnnnnnnnnnnnnnnnnnnnnnnnnnnnnnnnnnnnnnnnnnnnnnnnnnnnnnnnnnnnnnnnnnnnnnnnnnnnnnnnnnnnnnnnnnnnnnnnnnnnnnnnnnnnnnnnnnnnnnnnnnnnnnnnnnnnnnnnnnnnnnnnnnnnnnnnnnnnnnnnnnnnnnnnnnnnnnnnnnnnnnnnnnnnnnnnnnnnnnnnnnnnnnnnnnnnnnnnnnnnnnnnnnnnnnnnnnnnnnnnnnnnnnnnnnnnnnnnnnnnnnnnnnnnnnnnnnnnnnnnnnnnnnnnnnnnnnnnnnnnnnnnnnnnnnnnnnnnnnnnnnnnnnnnnnnnnnnnnnnnnnnnnnnnnnnnnnnnnnnnnnnnnnnnnnnnnnnnnnnnnnnnnnnnnnnnnnnnnnnnnnnnnnnnnnnnnnnnnnnnnnnnnnnnnnnnnnnnnnnnnnnnnnnnnnnnnnnnnnnnnnnnnnnnnnnnnnnnnnnnnnnnnnnnnnnnnnnnnnnnnnnnnnnnnnnnnnnnnnnnnnnnnnnnnnnnnnnnnnnnnnnnnnnnnnnnnnnnnnnnnnnnnnnnnnnnnnnnnnnnnnnnnnnnnnnnnnnnnnnnnnnnnnnnnnnnnnnnnnnnnnnnnnnnnnnnnnnnnnnnnnnnnnnnnnnnnnnnnnnnnnnnnnnnnnnnnnnnnnnnnnnnnnnnnnnnnnnnnnnnnnnnnnnnnnnnnnnnnnnnnnnnnnnnnnnnnnnnnnnnnnnnnnnnnnnnnnnnnnnnnnnnnnnnnnnnnnnnnnnnnnnnnnnnnnnnnnnnnnnnnnnnnnnnnnnnnnnnnnnnnnnnnnnnnnnnnnnnnnnnnnnnnnnnnnnnnnnnnnnnnnnnnnnnnnnnnnnnnnnnnnnnnnnnnnnnnnnnnnnnnnnnnnnnnnnnnnnnnnnnnnnnnnnnnnnnnnnnnnnnnnnnnnnnnnnnnnnnnnnnnnnnnnnnnnnnnnnnnnnnnnnnnnnnnnnnnnnnnnnnnnnnnnnnnnnnnnnnnnnnnnnnnnnnnnnnnnnnnnnnnnnnnnnnnnnnnnnnnnnnnnnnnnnnnnnnnnnnnnnnnnnnnnnnnnnnnnnnnnnnnnnnnnnnnnnnnnnnnnnnnnnnnnnnnnnnnnnnnnnnnnnnnnnnnnnnnnnnnnnnnnnnnnnnnnnnnnnnnnnnnnnnnnnnnnnnnnnnnnnnnnnnnnnnnnnnnnnnnnnnnnnnnnnnnnnnnnnnnnnnnnnnnnnnnnnnnnnnnnnnnnnnnnnnnnnnnnnnnnnnnnnnnnnnnnnnnnnnnnnnnnnnnnnnnnnnnnnnnnnnnnnnnnnnnnnnnnnnnnnnnnnnnnnnnnnnnnnnnnnnnnnnnnnnnnnnnnnnnnnnnnnnnnnnnnnnnnnnnnnnnnnnnnnnnnnnnnnnnnnnnnnnnnnnnnnnnnnnnnnnnnnnnnnnnnnnnnnnnnnnnnnnnnnnnnnnnnnnnnnnnnnnnnnnnnnnnnnnnnnnnnnnnnnnnnnnnnnnnnnnnnnnnnnnnnnnnnnnnnnnnnnnnnnnnnnnnnnnnnnnnnnnnnnnnnnnnnnnnnnnnnnnnnnnnnnnnnnnnnnnnnnnnnnnnnnnnnnnnnnnnnnnnnnnnnnnnnnnnnnnnnnnnnnnnnnnnnnnnnnnnnnnnnnnnnnnnnnnnnnnnnnnnnnnnnnnnnnnnnnnnnnnnnnnnnnnnnnnnnnnnnnnnnnnnnnnnnnnnnnnnnnnnnnnnnnnnnnnnnnnnnnnnnnnnnnnnnnnnnnnnnnnnnnnnnnnnnnnnnnnnnnnnnnnnnnnnnnnnnnnnnnnnnnnnnnnnnnnnnnnnnnnnnnnnnnnnnnnnnnnnnnnnnnnnnnnnnnnnnnnnnnnnnnnnnnnnnnnnnnnnnnnnnnnnnnnnnnnnnnnnnnnnnnnnnnnnnnnnnnnnnnnnnnnnnnnnnnnnnnnnnnnnnnnnnnnnnnnnnnnnnnnnnnnnnnnnnnnnnnnnnnnnnnnnnnnnnnnnnnnnnnnnnnnnnnnnnnnnnnnnnnnnnnnnnnnnnnnnnnnnnnnnnnnnnnnnnnnnnnnnnnnnnnnnnnnnnnnnnnnnnnnnnnnnnnnnnnnnnnnnnnnnnnnnnnnnnnnnnnnnnnnnnnnnnnnnnnnnnnnnnnnnnnnnnnnnnnnnnnnnnnnnnnnnnnnnnnnnnnnnnnnnnnnnnnnnnnnnnnnnnnnnnnnnnnnnnnnnnnnnnnnnnnnnnnnnnnnnnnnnnnnnnnnnnnnnnnnnnnnnnnnnnnnnnnnnnnnnnnnnnnnnnnnnnnnnnnnnnnnnnnnnnnnnnnnnnnnnnnnnnnnnnnnnnnnnnnnnnnnnnnnnnnnnnnnnnnnnnnnnnnnnnnnnnnnnnnnnnnnnnnnnnnnnnnnnnnnnnnnnnnnnnnnnnnnnnnnnnnnnnnnnnnnnnnnnnnnnnnnnnnnnnnnnnnnnnnnnnnnnnnnnnnnnnnnnnnnnnnnnnnnnnnnnnnnnnnnnnnnnnnnnnnnnnnnnnnnnnnnnnnnnnnnnnnnnnnnnnnnnnnnnnnnnnnnnnnnnnnnnnnnnnnnnnnnnnnnnnnnnnnnnnnnnnnnnnnnnnnnnnnnnnnnnnnnnnnnnnnnnnnnnnnnnnnnnnnnnnnnnnnnnnnnnnnnnnnnnnnnnnnnnnnnnnnnnnnnnnnnnnnnnnnnnnnnnnnnnnnnnnnnnnnnnnnnnnnnnnnnnnnnnnnnnnnnnnnnnnnnnnnnnnnnnnnnnnnnnnnnnnnnnnnnnnnnnnnnnnnnnnnnnnnnnnnnnnnnnnnnnnnnnnnnnnnnnnnnnnnnnnnnnnnnnnnnnnnnnnnnnnnnnnnnnnnnnnnnnnnnnnnnnnnnnnnnnnnnnnnnnnnnnnnnnnnnnnnnnnnnnnnnnnnnnnnnnnnnnnnnnnnnnnnnnnnnnnnnnnnnnnnnnnnnnnnnnnnnnnnnnnnnnnnnnnnnnnnnnnnnnnnnnnnnnnnnnnnnnnnnnnnnnnnnnnnnnnnnnnnnnnnnnnnnnnnnnnnnnnnnnnnnnnnnnnnnnnnnnnnnnnnnnnnnnnnnnnnnnnnnnnnnnnnnnnnnnnnnnnnnnnnnnnnnnnnnnnnnnnnnnnnnnnnnnnnnnnnnnnnnnnnnnnnnnnnnnnnnnnnnnnnnnnnnnnnnnnnnnnnnnnnnnnnnnnnnnnnnnnnnnnnnnnnnnnnnnnnnnnnnnnnnnnnnnnnnnnnnnnnnnnnnnnnnnnnnnnnnnnnnnnnnnnnnnnnnnnnnnnnnnnnnnnnnnnnnnnnnnnnnnnnnnnnnnnnnnnnnnnnnnnnnnnnnnnnnnnnnnnnnnnnnnnnnnnnnnnnnnnnnnnnnnnnnnnnnnnnnnnnnnnnnnnnnnnnnnnnnnnnnnnnnnnnnnnnnnnnnnnnnnnnnnnnnnnnnnnnnnnnnnnnnnnnnnnnnnnnnnnnnnnnnnnnnnnnnnnnnnnnnnnnnnnnnnnnnnnnnnnnnnnnnnnnnnnnnnnnnnnnnnnnnnnnnnnnnnnnnnnnnnnnnnnnnnnnnnnnnnnnnnnnnnnnnnnnnnnnnnnnnnnnnnnnnnnnnnnnnnnnnnnnnnnnnnnnnnnnnnnnnnnnnnnnnnnnnnnnnnnnnnnnnnnnnnnnnnnnnnnnnnnnnnnnnnnnnnnnnnnnnnnnnnnnnnnnnnnnnnnnnnnnnnnnnnnnnnnnnnnnnnnnnnnnnnnnnnnnnnnnnnnnnnnnnnnnnnnnnnnnnnnnnnnnnnnnnnnnnnnnnnnnnnnnnnnnnnnnnnnnnnnnnnnnnnnnnnnnnnnnnnnnnnnnnnnnnnnnnnnnnnnnnnnnnnnnnnnnnnnnnnnnnnnnnnnnnnnnnnnnnnnnnnnnnnnnnnnnnnnnnnnnnnnnnnnnnnnnnnnnnnnnnnnnnnnnnnnnnnnnnnnnnnnnnnnnnnnnnnnnnnnnnnnnnnnnnnnnnnnnnnnnnnnnnnnnnnnnnnnnnnnnnnnnnnnnnnnnnnnnnnnnnnnnnnnnnnnnnnnnnnnnnnnnnnnnnnnnnnnnnnnnnnnnnnnnnnnnnnnnnnnnnnnnnnnnnnnnnnnnnnnnnnnnnnnnnnnnnnnnnnnnnnnnnnnnnnnnnnnnnnnnnnnnnnnnnnnnnnnnnnnnnnnnnnnnnnnnnnnnnnnnnnnnnnnnnnnnnnnnnnnnnnnnnnnnnnnnnnnnnnnnnnnnnnnnnnnnnnnnnnnnnnnnnnnnnnnnnnnnnnnnnnnnnnnnnnnnnnnnnnnnnnnnnnnnnnnnnnnnnnnnnnnnnnnnnnnnnnnnnnnnnnnnnnnnnnnnnnnnnnnnnnnnnnnnnnnnnnnnnnnnnnnnnnnnnnnnnnnnnnnnnnnnnnnnnnnnnnnnnnnnnnnnnnnnnnnnnnnnnnnnnnnnnnnnnnnnnnnnnnnnnnnnnnnnnnnnnnnnnnnnnnnnnnnnnnnnnnnnnnnnnnnnnnnnnnnnnnnnnnnnnnnnnnnnnnnnnnnnnnnnnnnnnnnnnnnnnnnnnnnnnnnnnnnnnnnnnnnnnnnnnnnnnnnnnnnnnnnnnnnnnnnnnnnnnnnnnnnnnnnnnnnnnnnnnnnnnnnnnnnnnnnnnnnnnnnnnnnnnnnnnnnnnnnnnnnnnnnnnnnnnnnnnnnnnnnnnnnnnnnnnnnnnnnnnnnnnnnnnnnnnnnnnnnnnnnnnnnnnnnnnnnnnnnnnnnnnnnnnnnnnnnnnnnnnnnnnnnnnnnnnnnnnnnnnnnnnnnnnnnnnnnnnnnnnnnnnnnnnnnnnnnnnnnnnnnnnnnnnnnnnnnnnnnnnnnnnnnnnnnnnnnnnnnnnnnnnnnnnnnnnnnnnnnnnnnnnnnnnnnnnnnnnnnnnnnnnnnnnnnnnnnnnnnnnnnnnnnnnnnnnnnnnnnnnnnnnnnnnnnnnnnnnnnnnnnnnnnnnnnnnnnnnnnnnnnnnnnnnnnnnnnnnnnnnnnnnnnnnnnnnnnnnnnnnnnnnnnnnnnnnnnnnnnnnnnnnnnnnnnnnnnnnnnnnnnnnnnnnnnnnnnnnnnnnnnnnnnnnnnnnnnnnnnnnnnnnnnnnnnnnnnnnnnnnnnnnnnnnnnnnnnnnnnnnnnnnnnnnnnnnnnnnnnnnnnnnnnnnnnnnnnnnnnnnnnnnnnnnnnnnnnnnnnnnnnnnnnnnnnnnnnnnnnnnnnnnnnnnnnnnnnnnnnnnnnnnnnnnnnnnnnnnnnnnnnnnnnnnnnnnnnnnnnnnnnnnnnnnnnnnnnnnnnnnnnnnnnnnnnnnnnnnnnnnnnnnnnnnnnnnnnnnnnnnnnnnnnnnnnnnnnnnnnnnnnnnnnnnnnnnnnnnnnnnnnnnnnnnnnnnnnnnnnnnnnnnnnnnnnnnnnnnnnnnnnnnnnnnnnnnnnnnnnnnnnnnnnnnnnnnnnnnnnnnnnnnnnnnnnnnnnnnnnnnnnnnnnnnnnnnnnnnnnnnnnnnnnnnnnnnnnnnnnnnnnnnnnnnnnnnnnnnnnnnnnnnnnnnnnnnnnnnnnnnnnnnnnnnnnnnnnnnnnnnnnnnnnnnnnnnnnnnnnnnnnnnnnnnnnnnnnnnnnnnnnnnnnnnnnnnnnnnnnnnnnnnnnnnnnnnnnnnnnnnnnnnnnnnnnnnnnnnnnnnnnnnnnnnnnnnnnnnnnnnnnnnnnnnnnnnnnnnnnnnnnnnnnnnnnnnnnnnnnnnnnnnnnnnnnnnnnnnnnnnnnnnnnnnnnnnnnnnnnnnnnnnnnnnnnnnnnnnnnnnnnnnnnnnnnnnnnnnnnnnnnnnnnnnnnnnnnnnnnnnnnnnnnnnnnnnnnnnnnnnnnnnnnnnnnnnnnnnnnnnnnnnnnnnnnnnnnnnnnnnnnnnnnnnnnnnnnnnnnnnnnnnnnnnnnnnnnnnnnnnnnnnnnnnnnnnnnnnnnnnnnnnnnnnnnnnnnnnnnnnnnnnnnnnnnnnnnnnnnnnnnnnnnnnnnnnnnnnnnnnnnnnnnnnnnnnnnnnnnnnnnnnnnnnnnnnnnnnnnnnnnnnnnnnnnnnnnnnnnnnnnnnnnnnnnnnnnnnnnnnnnnnnnnnnnnnnnnnnnnnnnnnnnnnnnnnnnnnnnnnnnnnnnnnnnnnnnnnnnnnnnnnnnnnnnnnnnnnnnnnnnnnnnnnnnnnnnnnnnnnnnnnnnnnnnnnnnnnnnnnnnnnnnnnnnnnnnnnnnnnnnnnnnnnnnnnnnnnnnnnnnnnnnnnnnnnnnnnnnnnnnnnnnnnnnnnnnnnnnnnnnnnnnnnnnnnnnnnnnnnnnnnnnnnnnnnnnnnnnnnnnnnnnnnnnnnnnnnnnnnnnnnnnnnnnnnnnnnnnnnnnnnnnnnnnnnnnnnnnnnnnnnnnnnnnnnnnnnnnnnnnnnnnnnnnnnnnnnnnnnnnnnnnnnnnnnnnnnnnnnnnnnnnnnnnnnnnnnnnnnnnnnnnnnnnnnnnnnnnnnnnnnnnnnnnnnnnnnnnnnnnnnnnnnnnnnnnnnnnnnnnnnnnnnnnnnnnnnnnnnnnnnnnnnnnnnnnnnnnnnnnnnnnnnnnnnnnnnnnnnnnnnnnnnnnnnnnnnnnnnnnnnnnnnnnnnnnnnnnnnnnnnnnnnnnnnnnnnnnnnnnnnnnnnnnnnnnnnnnnnnnnnnnnnnnnnnnnnnnnnnnnnnnnnnnnnnnnnnnnnnnnnnnnnnnnnnnnnnnnnnnnnnnnnnnnnnnnnnnnnnnnnnnnnnnnnnnnnnnnnnnnnnnnnnnnnnnnnnnnnnnnnnnnnnnnnnnnnnnnnnnnnnnnnnnnnnnnnnnnnnnnnnnnnnnnnnnnnnnnnnnnnnnnnnnnnnnnnnnnnnnnnnnnnnnnnnnnnnnnnnnnnnnnnnnnnnnnnnnnnnnnnnnnnnnnnnnnnnnnnnnnnnnnnnnnnnnnnnnnnnnnnnnnnnnnnnnnnnnnnnnnnnnnnnnnnnnnnnnnnnnnnnnnnnnnnnnnnnnnnnnnnnnnnnnnnnnnnnnnnnnnnnnnnnnnnnnnnnnnnnnnnnnnnnnnnnnnnnnnnnnnnnnnnnnnnnnnnnnnnnnnnnnnnnnnnnnnnnnnnnnnnnnnnnnnnnnnnnnnnnnnnnnnnnnnnnnnnnnnnnnnnnnnnnnnnnnnnnnnnnnnnnnnnnnnnnnnnnnnnnnnnnnnnnnnnnnnnnnnnnnnnnnnnnnnnnnnnnnnnnnnnnnnnnnnnnnnnnnnnnnnnnnnnnnnnnnnnnnnnnnnnnnnnnnnnnnnnnnnnnnnnnnnnnnnnnnnnnnnnnnnnnnnnnnnnnnnnnnnnnnnnnnnnnnnnnnnnnnnnnnnnnnnnnnnnnnnnnnnnnnnnnnnnnnnnnnnnnnnnnnnnnnnnnnnnnnnnnnnnnnnnnnnnnnnnnnnnnnnnnnnnnnnnnnnnnnnnnnnnnnnnnnnnnnnnnnnnnnnnnnnnnnnnnnnnnnnnnnnnnnnnnnnnnnnnnnnnnnnnnnnnnnnnnnnnnnnnnnnnnnnnnnnnnnnnnnnnnnnnnnnnnnnnnnnnnnnnnnnnnnnnnnnnnnnnnnnnnnnnnnnnnnnnnnnnnnnnnnnnnnnnnnnnnnnnnnnnnnnnnnnnnnnnnnnnnnnnnnnnnnnnnnnnnnnnnnnnnnnnnnnnnnnnnnnnnnnnnnnnnnnnnnnnnnnnnnnnnnnnnnnnnnnnnnnnnnnnnnnnnnnnnnnnnnnnnnnnnnnnnnnnnnnnnnnnnnnnnnnnnnnnnnnnnnnnnnnnnnnnnnnnnnnnnnnnnnnnnnnnnnnnnnnnnnnnnnnnnnnnnnnnnnnnnnnnnnnnnnnnnnnnnnnnnnnnnnnnnnnnnnnnnnnnnnnnnnnnnnnnnnnnnnnnnnnnnnnnnnnnnnnnnnnnnnnnnnnnnnnnnnnnnnnnnnnnnnnnnnnnnnnnnnnnnnnnnnnnnnnnnnnnnnnnnnnnnnnnnnnnnnnnnnnnnnnnnnnnnnnnnnnnnnnnnnnnnnnnnnnnnnnnnnnnnnnnnnnnnnnnnnnnnnnnnnnnnnnnnnnnnnnnnnnnnnnnnnnnnnnnnnnnnnnnnnnnnnnnnnnnnnnnnnnnnnnnnnnnnnnnnnnnnnnnnnnnnnnnnnnnnnnnnnnnnnnnnnnnnnnnnnnnnnnnnnnnnnnnnnnnnnnnnnnnnnnnnnnnnnnnnnnnnnnnnnnnnnnnnnnnnnnnnnnnnnnnnnnnnnnnnnnnnnnnnnnnnnnnnnnnnnnnnnnnnnnnnnnnnnnnnnnnnnnnnnnnnnnnnnnnnnnnnnnnnnnnnnnnnnnnnnnnnnnnnnnnnnnnnnnnnnnnnnnnnnnnnnnnnnnnnnnnnnnnnnnnnnnnnnnnnnnnnnnnnnnnnnnnnnnnnnnnnnnnnnnnnnnnnnnnnnnnnnnnnnnnnnnnnnnnnnnnnnnnnnnnnnnnnnnnnnnnnnnnnnnnnnnnnnnnnnnnnnnnnnnnnnnnnnnnnnnnnnnnnnnnnnnnnnnnnnnnnnnnnnnnnnnnnnnnnnnnnnnnnnnnnnnnnnnnnnnnnnnnnnnnnnnnnnnnnnnnnnnnnnnnnnnnnnnnnnnnnnnnnnnnnnnnnnnnnnnnnnnnnnnnnnnnnnnnnnnnnnnnnnnnnnnnnnnnnnnnnnnnnnnnnnnnnnnnnnnnnnnnnnnnnnnnnnnnnnnnnnnnnnnnnnnnnnnnnnnnnnnnnnnnnnnnnnnnnnnnnnnnnnnnnnnnnnnnnnnnnnnnnnnnnnnnnnnnnnnnnnnnnnnnnnnnnnnnnnnnnnnnnnnnnnnnnnnnnnnnnnnnnnnnnnnnnnnnnnnnnnnnnnnnnnnnnnnnnnnnnnnnnnnnnnnnnnnnnnnnnnnnnnnnnnnnnnnnnnnnnnnnnnnnnnnnnnnnnnnnnnnnnnnnnnnnnnnnnnnnnnnnnnnnnnnnnnnnnnnnnnnnnnnnnnnnnnnnnnnnnnnnnnnnnnnnnnnnnnnnnnnnnnnnnnnnnnnnnnnnnnnnnnnnnnnnnnnnnnnnnnnnnnnnnnnnnnnnnnnnnnnnnnnnnnnnnnnnnnnnnnnnnnnnnnnnnnnnnnnnnnnnnnnnnnnnnnnnnnnnnnnnnnnnnnnnnnnnnnnnnnnnnnnnnnnnnnnnnnnnnnnnnnnnnnnnnnnnnnnnnnnnnnnnnnnnnnnnnnnnnnnnnnnnnnnnnnnnnnnnnnnnnnnnnnnnnnnnnnnnnnnnnnnnnnnnnnnnnnnnnnnnnnnnnnnnnnnnnnnnnnnnnnnnnnnnnnnnnnnnnnnnnnnnnnnnnnnnnnnnnnnnnnnnnnnnnnnnnnnnnnnnnnnnnnnnnnnnnnnnnnnnnnnnnnnnnnnnnnnnnnnnnnnnnnnnnnnnnnnnnnnnnnnnnnnnnnnnnnnnnnnnnnnnnnnnnnnnnnnnnnnnnnnnnnnnnnnnnnnnnnnnnnnnnnnnnnnnnnnnnnnnnnnnnnnnnnnnnnnnnnnnnnnnnnnnnnnnnnnnnnnnnnnnnnnnnnnnnnnnnnnnnnnnnnnnnnnnnnnnnnnnnnnnnnnnnnnnnnnnnnnnnnnnnnnnnnnnnnnnnnnnnnnnnnnnnnnnnnnnnnnnnnnnnnnnnnnnnnnnnnnnnnnnnnnnnnnnnnnnnnnnnnnnnnnnnnnnnnnnnnnnnnnnnnnnnnnnnnnnnnnnnnnnnnnnnnnnnnnnnnnnnnnnnnnnnnnnnnnnnnnnnnnnnnnnnnnnnnnnnnnnnnnnnnnnnnnnnnnnnnnnnnnnnnnnnnnnnnnnnnnnnnnnnnnnnnnnnnnnnnnnnnnnnnnnnnnnnnnnnnnnnnnnnnnnnnnnnnnnnnnnnnnnnnnnnnnnnnnnnnnnnnnnnnnnnnnnnnnnnnnnnnnnnnnnnnnnnnnnnnnnnnnnnnnnnnnnnnnnnnnnnnnnnnnnnnnnnnnnnnnnnnnnnnnnnnnnnnnnnnnnnnnnnnnnnnnnnnnnnnnnnnnnnnnnnnnnnnnnnnnnnnnnnnnnnnnnnnnnnnnnnnnnnnnnnnnnnnnnnnnnnnnnnnnnnnnnnnnnnnnnnnnnnnnnnnnnnnnnnnnnnnnnnnnnnnnnnnnnnnnnnnnnnnnnnnnnnnnnnnnnnnnnnnnnnnnnnnnnnnnnnnnnnnnnnnnnnnnnnnnnnnnnnnnnnnnnnnnnnnnnnnnnnnnnnnnnnnnnnnnnnnnnnnnnnnnnnnnnnnnnnnnnnnnnnnnnnnnnnnnnnnnnnnnnnnnnnnnnnnnnnnnnnnnnnnnnnnnnnnnnnnnnnnnnnnnnnnnnnnnnnnnnnnnnnnnnnnnnnnnnnnnnnnnnnnnnnnnnnnnnnnnnnnnnnnnnnnnnnnnnnnnnnnnnnnnnnnnnnnnnnnnnnnnnnnnnnnnnnnnnnnnnnnnnnnnnnnnnnnnnnnnnnnnnnnnnnnnnnnnnnnnnnnnnnnnnnnnnnnnnnnnnnnnnnnnnnnnnnnnnnnnnnnnnnnnnnnnnnnnnnnnnnnnnnnnnnnnnnnnnnnnnnnnnnnnnnnnnnnnnnnnnnnnnnnnnnnnnnnnnnnnnnnnnnnnnnnnnnnnnnnnnnnnnnnnnnnnnnnnnnnnnnnnnnnnnnnnnnnnnnnnnnnnnnnnnnnnnnnnnnnnnnnnnnnnnnnnnnnnnnnnnnnnnnnnnnnnnnnnnnnnnnnnnnnnnnnnnnnnnnnnnnnnnnnnnnnnnnnnnnnnnnnnnnnnnnnnnnnnnnnnnnnnnnnnnnnnnnnnnnnnnnnnnnnnnnnnnnnnnnnnnnnnnnnnnnnnnnnnnnnnnnnnnnnnnnnnnnnnnnnnnnnnnnnnnnnnnnnnnnnnnnnnnnnnnnnnnnnnnnnnnnnnnnnnnnnnnnnnnnnnnnnnnnnnnnnnnnnnnnnnnnnnnnnnnnnnnnnnnnnnnnnnnnnnnnnnnnnnnnnnnnnnnnnnnnnnnnnnnnnnnnnnnnnnnnnnnnnnnnnnnnnnnnnnnnnnnnnnnnnnnnnnnnnnnnnnnnnnnnnnnnnnnnnnnnnnnnnnnnnnnnnnnnnnnnnnnnnnnnnnnnnnnnnnnnnnnnnnnnnnnnnnnnnnnnnnnnnnnnnnnnnnnnnnnnnnnnnnnnnnnnnnnnnnnnnnnnnnnnnnnnnnnnnnnnnnnnnnnnnnnnnnnnnnnnnnnnnnnnnnnnnnnnnnnnnnnnnnnnnnnnnnnnnnnnnnnnnnnnnnnnnnnnnnnnnnnnnnnnnnnnnnnnnnnnnnnnnnnnnnnnnnnnnnnnnnnnnnnnnnnnnnnnnnnnnnnnnnnnnnnnnnnnnnnnnnnnnnnnnnnnnnnnnnnnnnnnnnnnnnnnnnnnnnnnnnnnnnnnnnnnnnnnnnnnnnnnnnnnnnnnnnnnnnnnnnnnnnnnnnnnnnnnnnnnnnnnnnnnnnnnnnnnnnnnnnnnnnnnnnnnnnnnnnnnnnnnnnnnnnnnnnnnnnnnnnnnnnnnnnnnnnnnnnnnnnnnnnnnnnnnnnnnnnnnnnnnnnnnnnnnnnnnnnnnnnnnnnnnnnnnnnnnnnnnnnnnnnnnnnnnnnnnnnnnnnnnnnnnnnnnnnnnnnnnnnnnnnnnnnnnnnnnnnnnnnnnnnnnnnnnnnnnnnnnnnnnnnnnnnnnnnnnnnnnnnnnnnnnnnnnnnnnnnnnnnnnnnnnnnnnnnnnnnnnnnnnnnnnnnnnnnnnnnnnnnnnnnnnnnnnnnnnnnnnnnnnnnnnnnnnnnnnnnnnnnnnnnnnnnnnnnnnnnnnnnnnnnnnnnnnnnnnnnnnnnnnnnnnnnnnnnnnnnnnnnnnnnnnnnnnnnnnnnnnnnnnnnnnnnnnnnnnnnnnnnnnnnnnnnnnnnnnnnnnnnnnnnnnnnnnnnnnnnnnnnnnnnnnnnnnnnnnnnnnnnnnnnnnnnnnnnnnnnnnnnnnnnnnnnnnnnnnnnnnnnnnnnnnnnnnnnnnnnnnnnnnnnnnnnnnnnnnnnnnnnnnnnnnnnnnnnnnnnnnnnnnnnnnnnnnnnnnnnnnnnnnnnnnnnnnnnnnnnnnnnnnnnnnnnnnnnnnnnnnnnnnnnnnnnnnnnnnnnnnnnnnnnnnnnnnnnnnnnnnnnnnnnnnnnnnnnnnnnnnnnnnnnnnnnnnnnnnnnnnnnnnnnnnnnnnnnnnnnnnnnnnnnnnnnnnnnnnnnnnnnnnnnnnnnnnnnnnnnnnnnnnnnnnnnnnnnnnnnnnnnnnnnnnnnnnnnnnnnnnnnnnnnnnnnnnnnnnnnnnnnnnnnnnnnnnnnnnnnnnnnnnnnnnnnnnnnnnnnnnnnnnnnnnnnnnnnnnnnnnnnnnnnnnnnnnnnnnnnnnnnnnnnnnnnnnnnnnnnnnnnnnnnnnnnnnnnnnnnnnnnnnnnnnnnnnnnnnnnnnnnnnnnnnnnnnnnnnnnnnnnnnnnnnnnnnnnnnnnnnnnnnnnnnnnnnnnnnnnnnnnnnnnnnnnnnnnnnnnnnnnnnnnnnnnnnnnnnnnnnnnnnnnnnnnnnnnnnnnnnnnnnnnnnnnnnnnnnnnnnnnnnnnnnnnnnnnnnnnnnnnnnnnnnnnnnnnnnnnnnnnnnnnnnnnnnnnnnnnnnnnnnnnnnnnnnnnnnnnnnnnnnnnnnnnnnnnnnnnnnnnnnnnnnnnnnnnnnnnnnnnnnnnnnnnnnnnnnnnnnnnnnnnnnnnnnnnnnnnnnnnnnnnnnnnnnnnnnnnnnnnnnnnnnnnnnnnnnnnnnnnnnnnnnnnnnnnnnnnnnnnnnnnnnnnnnnnnnnnnnnnnnnnnnnnnnnnnnnnnnnnnnnnnnnnnnnnnnnnnnnnnnnnnnnnnnnnnnnnnnnnnnnnnnnnnnnnnnnnnnnnnnnnnnnnnnnnnnnnnnnnnnnnnnnnnnnnnnnnnnnnnnnnnnnnnnnnnnnnnnnnnnnnnnnnnnnnnnnnnnnnnnnnnnnnnnnnnnnnnnnnnnnnnnnnnnnnnnnnnnnnnnnnnnnnnnnnnnnnnnnnnnnnnnnnnnnnnnnnnnnnnnnnnnnnnnnnnnnnnnnnnnnnnnnnnnnnnnnnnnnnnnnnnnnnnnnnnnnnnnnnnnnnnnnnnnnnnnnnnnnnnnnnnnnnnnnnnnnnnnnnnnnnnnnnnnnnnnnnnnnnnnnnnnnnnnnnnnnnnnnnnnnnnnnnnnnnnnnnnnnnnnnnnnnnnnnnnnnnnnnnnnnnnnnnnnnnnnnnnnnnnnnnnnnnnnnnnnnnnnnnnnnnnnnnnnnnnnnnnnnnnnnnnnnnnnnnnnnnnnnnnnnnnnnnnnnnnnnnnnnnnnnnnnnnnnnnnnnnnnnnnnnnnnnnnnnnnnnnnnnnnnnnnnnnnnnnnnnnnnnnnnnnnnnnnnnnnnnnnnnnnnnnnnnnnnnnnnnnnnnnnnnnnnnnnnnnnnnnnnnnnnnnnnnnnnnnnnnnnnnnnnnnnnnnnnnnnnnnnnnnnnnnnnnnnnnnnnnnnnnnnnnnnnnnnnnnnnnnnnnnnnnnnnnnnnnnnnnnnnnnnnnnnnnnnnnnnnnnnnnnnnnnnnnnnnnnnnnnnnnnnnnnnnnnnnnnnnnnnnnnnnnnnnnnnnnnnnnnnnnnnnnnnnnnnnnnnnnnnnnnnnnnnnnnnnnnnnnnnnnnnnnnnnnnnnnnnnnnnnnnnnnnnnnnnnnnnnnnnnnnnnnnnnnnnnnnnnnnnnnnnnnnnnnnnnnnnnnnnnnnnnnnnnnnnnnnnnnnnnnnnnnnnnnnnnnnnnnnnnnnnnnnnnnnnnnnnnnnnnnnnnnnnnnnnnnnnnnnnnnnnnnnnnnnnnnnnnnnnnnnnnnnnnnnnnnnnnnnnnnnnnnnnnnnnnnnnnnnnnnnnnnnnnnnnnnnnnnnnnnnnnnnnnnnnnnnnnnnnnnnnnnnnnnnnnnnnnnnnnnnnnnnnnnnnnnnnnnnnnnnnnnnnnnnnnnnnnnnnnnnnnnnnnnnnnnnnnnnnnnnnnnnnnnnnnnnnnnnnnnnnnnnnnnnnnnnnnnnnnnnnnnnnnnnnnnnnnnnnnnnnnnnnnnnnnnnnnnnnnnnnnnnnnnnnnnnnnnnnnnnnnnnnnnnnnnnnnnnnnnnnnnnnnnnnnnnnnnnnnnnnnnnnnnnnnnnnnnnnnnnnnnnnnnnnnnnnnnnnnnnnnnnnnnnnnnnnnnnnnnnnnnnnnnnnnnnnnnnnnnnnnnnnnnnnnnnnnnnnnnnnnnnnnnnnnnnnnnnnnnnnnnnnnnnnnnnnnnnnnnnnnnnnnnnnnnnnnnnnnnnnnnnnnnnnnnnnnnnnnnnnnnnnnnnnnnnnnnnnnnnnnnnnnnnnnnnnnnnnnnnnnnnnnnnnnnnnnnnnnnnnnnnnnnnnnnnnnnnnnnnnnnnnnnnnnnnnnnnnnnnnnnnnnnnnnnnnnnnnnnnnnnnnnnnnnnnnnnnnnnnnnnnnnnnnnnnnnnnnnnnnnnnnnnnnnnnnnnnnnnnnnnnnnnnnnnnnnnnnnnnnnnnnnnnnnnnnnnnnnnnnnnnnnnnnnnnnnnnnnnnnnnnnnnnnnnnnnnnnnnnnnnnnnnnnnnnnnnnnnnnnnnnnnnnnnnnnnnnnnnnnnnnnnnnnnnnnnnnnnnnnnnnnnnnnnnnnnnnnnnnnnnnnnnnnnnnnnnnnnnnnnnnnnnnnnnnnnnnnnnnnnnnnnnnnnnnnnnnnnnnnnnnnnnnnnnnnnnnnnnnnnnnnnnnnnnnnnnnnnnnnnnnnnnnnnnnnnnnnnnnnnnnnnnnnnnnnnnnnnnnnnnnnnnnnnnnnnnnnnnnnnnnnnnnnnnnnnnnnnnnnnnnnnnnnnnnnnnnnnnnnnnnnnnnnnnnnnnnnnnnnnnnnnnnnnnnnnnnnnnnnnnnnnnnnnnnnnnnnnnnnnnnnnnnnnnnnnnnnnnnnnnnnnnnnnnnnnnnnnnnnnnnnnnnnnnnnnnnnnnnnnnnnnnnnnnnnnnnnnnnnnnnnnnnnnnnnnnnnnnnnnnnnnnnnnnnnnnnnnnnnnnnnnnnnnnnnnnnnnnnnnnnnnnnnnnnnnnnnnnnnnnnnnnnnnnnnnnnnnnnnnnnnnnnnnnnnnnnnnnnnnnnnnnnnnnnnnnnnnnnnnnnnnnnnnnnnnnnnnnnnnnnnnnnnnnnnnnnnnnnnnnnnnnnnnnnnnnnnnnnnnnnnnnnnnnnnnnnnnnnnnnnnnnnnnnnnnnnnnnnnnnnnnnnnnnnnnnnnnnnnnnnnnnnnnnnnnnnnnnnnnnnnnnnnnnnnnnnnnnnnnnnnnnnnnnnnnnnnnnnnnnnnnnnnnnnnnnnnnnnnnnnnnnnnnnnnnnnnnnnnnnnnnnnnnnnnnnnnnnnnnnnnnnnnnnnnnnnnnnnnnnnnnnnnnnnnnnnnnnnnnnnnnnnnnnnnnnnnnnnnnnnnnnnnnnnnnnnnnnnnnnnnnnnnnnnnnnnnnnnnnnnnnnnnnnnnnnnnnnnnnnnnnnnnnnnnnnnnnnnnnnnnnnnnnnnnnnnnnnnnnnnnnnnnnnnnnnnnnnnnnnnnnnnnnnnnnnnnnnnnnnnnnnnnnnnnnnnnnnnnnnnnnnnnnnnnnnnnnnnnnnnnnnnnnnnnnnnnnnnnnnnnnnnnnnnnnnnnnnnnnnnnnnnnnnnnnnnnnnnnnnnnnnnnnnnnnnnnnnnnnnnnnnnnnnnnnnnnnnnnnnnnnnnnnnnnnnnnnnnnnnnnnnnnnnnnnnnnnnnnnnnnnnnnnnnnnnnnnnnnnnnnnnnnnnnnnnnnnnnnnnnnnnnnnnnnnnnnnnnnnnnnnnnnnnnnnnnnnnnnnnnnnnnnnnnnnnnnnnnnnnnnnnnnnnnnnnnnnnnnnnnnnnnnnnnnnnnnnnnnnnnnnnnnnnnnnnnnnnnnnnnnnnnnnnnnnnnnnnnnnnnnnnnnnnnnnnnnnnnnnnnnnnnnnnnnnnnnnnnnnnnnnnnnnnnnnnnnnnnnnnnnnnnnnnnnnnnnnnnnnnnnnnnnnnnnnnnnnnnnnnnnnnnnnnnnnnnnnnnnnnnnnnnnnnnnnnnnnnnnnnnnnnnnnnnnnnnnnnnnnnnnnnnnnnnnnnnnnnnnnnnnnnnnnnnnnnnnnnnnnnnnnnnnnnnnnnnnnnnnnnnnnnnnnnnnnnnnnnnnnnnnnnnnnnnnnnnnnnnnnnnnnnnnnnnnnnnnnnnnnnnnnnnnnnnnnnnnnnnnnnnnnnnnnnnnnnnnnnnnnnnnnnnnnnnnnnnnnnnnnnnnnnnnnnnnnnnnnnnnnnnnnnnnnnnnnnnnnnnnnnnnnnnnnnnnnnnnnnnnnnnnnnnnnnnnnnnnnnnnnnnnnnnnnnnnnnnnnnnnnnnnnnnnnnnnnnnnnnnnnnnnnnnnnnnnnnnnnnnnnnnnnnnnnnnnnnnnnnnnnnnnnnnnnnnnnnnnnnnnnnnnnnnnnnnnnnnnnnnnnnnnnnnnnnnnnnnnnnnnnnnnnnnnnnnnnnnnnnnnnnnnnnnnnnnnnnnnnnnnnnnnnnnnnnnnnnnnnnnnnnnnnnnnnnnnnnnnnnnnnnnnnnnnnnnnnnnnnnnnnnnnnnnnnnnnnnnnnnnnnnnnnnnnnnnnnnnnnnnnnnnnnnnnnnnnnnnnnnnnnnnnnnnnnnnnnnnnnnnnnnnnnnnnnnnnnnnnnnnnnnnnnnnnnnnnnnnnnnnnnnnnnnnnnnnnnnnnnnnnnnnnnnnnnnnnnnnnnnnnnnnnnnnnnnnnnnnnnnnnnnnnnnnnnnnnnnnnnnnnnnnnnnnnnnnnnnnnnnnnnnnnnnnnnnnnnnnnnnnnnnnnnnnnnnnnnnnnnnnnnnnnnnnnnnnnnnnnnnnnnnnnnnnnnnnnnnnnnnnnnnnnnnnnnnnnnnnnnnnnnnnnnnnnnnnnnnnnnnnnnnnnnnnnnnnnnnnnnnnnnnnnnnnnnnnnnnnnnnnnnnnnnnnnnnnnnnnnnnnnnnnnnnnnnnnnnnnnnnnnnnnnnnnnnnnnnnnnnnnnnnnnnnnnnnnnnnnnnnnnnnnnnnnnnnnnnnnnnnnnnnnnnnnnnnnnnnnnnnnnnnnnnnnnnnnnnnnnnnnnnnnnnnnnnnnnnnnnnnnnnnnnnnnnnnnnnnnnnnnnnnnnnnnnnnnnnnnnnnnnnnnnnnnnnnnnnnnnnnnnnnnnnnnnnnnnnnnnnnnnnnnnnnnnnnnnnnnnnnnnnnnnnnnnnnnnnnnnnnnnnnnnnnnnnnnnnnnnnnnnnnnnnnnnnnnnnnnnnnnnnnnnnnnnnnnnnnnnnnnnnnnnnnnnnnnnnnnnnnnnnnnnnnnnnnnnnnnnnnnnnnnnnnnnnnnnnnnnnnnnnnnnnnnnnnnnnnnnnnnnnnnnnnnnnnnnnnnnnnnnnnnnnnnnnnnnnnnnnnnnnnnnnnnnnnnnnnnnnnnnnnnnnnnnnnnnnnnnnnnnnnnnnnnnnnnnnnnnnnnnnnnnnnnnnnnnnnnnnnnnnnnnnnnnnnnnnnnnnnnnnnnnnnnnnnnnnnnnnnnnnnnnnnnnnnnnnnnnnnnnnnnnnnnnnnnnnnnnnnnnnnnnnnnnnnnnnnnnnnnnnnnnnnnnnnnnnnnnnnnnnnnnnnnnnnnnnnnnnnnnnnnnnnnnnnnnnnnnnnnnnnnnnnnnnnnnnnnnnnnnnnnnnnnnnnnnnnnnnnnnnnnnnnnnnnnnnnnnnnnnnnnnnnnnnnnnnnnnnnnnnnnnnnnnnnnnnnnnnnnnnnnnnnnnnnnnnnnnnnnnnnnnnnnnnnnnnnnnnnnnnnnnnnnnnnnnnnnnnnnnnnnnnnnnnnnnnnnnnnnnnnnnnnnnnnnnnnnnnnnnnnnnnnnnnnnnnnnnnnnnnnnnnnnnnnnnnnnnnnnnnnnnnnnnnnnnnnnnnnnnnnnnnnnnnnnnnnnnnnnnnnnnnnnnnnnnnnnnnnnnnnnnnnnnnnnnnnnnnnnnnnnnnnnnnnnnnnnnnnnnnnnnnnnnnnnnnnnnnnnnnnnnnnnnnnnnnnnnnnnnnnnnnnnnnnnnnnnnnnnnnnnnnnnnnnnnnnnnnnnnnnnnnnnnnnnnnnnnnnnnnnnnnnnnnnnnnnnnnnnnnnnnnnnnnnnnnnnnnnnnnnnnnnnnnnnnnnnnnnnnnnnnnnnnnnnnnnnnnnnnnnnnnnnnnnnnnnnnnnnnnnnnnnnnnnnnnnnnnnnnnnnnnnnnnnnnnnnnnnnnnnnnnnnnnnnnnnnnnnnnnnnnnnnnnnnnnnnnnnnnnnnnnnnnnnnnnnnnnnnnnnnnnnnnnnnnnnnnnnnnnnnnnnnnnnnnnnnnnnnnnnnnnnnnnnnnnnnnnnnnnnnnnnnnnnnnnnnnnnnnnnnnnnnnnnnnnnnnnnnnnnnnnnnnnnnnnnnnnnnnnnnnnnnnnnnnnnnnnnnnnnnnnnnnnnnnnnnnnnnnnnnnnnnnnnnnnnnnnnnnnnnnnnnnnnnnnnnnnnnnnnnnnnnnnnnnnnnnnnnnnnnnnnnnnnnnnnnnnnnnnnnnnnnnnnnnnnnnnnnnnnnnnnnnnnnnnnnnnnnnnnnnnnnnnnnnnnnnnnnnnnnnnnnnnnnnnnnnnnnnnnnnnnnnnnnnnnnnnnnnnnnnnnnnnnnnnnnnnnnnnnnnnnnnnnnnnnnnnnnnnnnnnnnnnnnnnnnnnnnnnnnnnnnnnnnnnnnnnnnnnnnnnnnnnnnnnnnnnnnnnnnnnnnnnnnnnnnnnnnnnnnnnnnnnnnnnnnnnnnnnnnnnnnnnnnnnnnnnnnnnnnnnnnnnnnnnnnnnnnnnnnnnnnnnnnnnnnnnnnnnnnnnnnnnnnnnnnnnnnnnnnnnnnnnnnnnnnnnnnnnnnnnnnnnnnnnnnnnnnnnnnnnnnnnnnnnnnnnnnnnnnnnnnnnnnnnnnnnnnnnnnnnnnnnnnnnnnnnnnnnnnnnnnnnnnnnnnnnnnnnnnnnnnnnnnnnnnnnnnnnnnnnnnnnnnnnnnnnnnnnnnnnnnnnnnnnnnnnnnnnnnnnnnnnnnnnnnnnnnnnnnnnnnnnnnnnnnnnnnnnnnnnnnnnnnnnnnnnnnnnnnnnnnnnnnnnnnnnnnnnnnnnnnnnnnnnnnnnnnnnnnnnnnnnnnnnnnnnnnnnnnnnnnnnnnnnnnnnnnnnnnnnnnnnnnnnnnnnnnnnnnnnnnnnnnnnnnnnnnnnnnnnnnnnnnnnnnnnnnnnnnnnnnnnnnnnnnnnnnnnnnnnnnnnnnnnnnnnnnnnnnnnnnnnnnnnnnnnnnnnnnnnnnnnnnnnnnnnnnnnnnnnnnnnnnnnnnnnnnnnnnnnnnnnnnnnnnnnnnnnnnnnnnnnnnnnnnnnnnnnnnnnnnnnnnnnnnnnnnnnnnnnnnnnnnnnnnnnnnnnnnnnnnnnnnnnnnnnnnnnnnnnnnnnnnnnnnnnnnnnnnnnnnnnnnnnnnnnnnnnnnnnnnnnnnnnnnnnnnnnnnnnnnnnnnnnnnnnnnnnnnnnnnnnnnnnnnnnnnnnnnnnnnnnnnnnnnnnnnnnnnnnnnnnnnnnnnnnnnnnnnnnnnnnnnnnnnnnnnnnnnnnnnnnnnnnnnnnnnnnnnnnnnnnnnnnnnnnnnnnnnnnnnnnnnnnnnnnnnnnnnnnnnnnnnnnnnnnnnnnnnnnnnnnnnnnnnnnnnnnnnnnnnnnnnnnnnnnnnnnnnnnnnnnnnnnnnnnnnnnnnnnnnnnnnnnnnnnnnnnnnnnnnnnnnnnnnnnnnnnnnnnnnnnnnnnnnnnnnnnnnnnnnnnnnnnnnnnnnnnnnnnnnnnnnnnnnnnnnnnnnnnnnnnnnnnnnnnnnnnnnnnnnnnnnnnnnnnnnnnnnnnnnnnnnnnnnnnnnnnnnnnnnnnnnnnnnnnnnnnnnnnnnnnnnnnnnnnnnnnnnnnnnnnnnnnnnnnnnnnnnnnnnnnnnnnnnnnnnnnnnnnnnnnnnnnnnnnnnnnnnnnnnnnnnnnnnnnnnnnnnnnnnnnnnnnnnnnnnnnnnnnnnnnnnnnnnnnnnnnnnnnnnnnnnnnnnnnnnnnnnnnnnnnnnnnnnnnnnnnnnnnnnnnnnnnnnnnnnnnnnnnnnnnnnnnnnnnnnnnnnnnnnnnnnnnnnnnnnnnnnnnnnnnnnnnnnnnnnnnnnnnnnnnnnnnnnnnnnnnnnnnnnnnnnnnnnnnnnnnnnnnnnnnnnnnnnnnnnnnnnnnnnnnnnnnnnnnnnnnnnnnnnnnnnnnnnnnnnnnnnnnnnnnnnnnnnnnnnnnnnnnnnnnnnnnnnnnnnnnnnnnnnnnnnnnnnnnnnnnnnnnnnnnnnnnnnnnnnnnnnnnnnnnnnnnnnnnnnnnnnnnnnnnnnnnnnnnnnnnnnnnnnnnnnnnnnnnnnnnnnnnnnnnnnnnnnnnnnnnnnnnnnnnnnnnnnnnnnnnnnnnnnnnnnnnnnnnnnnnnnnnnnnnnnnnnnnnnnnnnnnnnnnnnnnnnnnnnnnnnnnnnnnnnnnnnnnnnnnnnnnnnnnnnnnnnnnnnnnnnnnnnnnnnnnnnnnnnnnnnnnnnnnnnnnnnnnnnnnnnnnnnnnnnnnnnnnnnnnnnnnnnnnnnnnnnnnnnnnnnnnnnnnnnnnnnnnnnnnnnnnnnnnnnnnnnnnnnnnnnnnnnnnnnnnnnnnnnnnnnnnnnnnnnnnnnnnnnnnnnnnnnnnnnnnnnnnnnnnnnnnnnnnnnnnnnnnnnnnnnnnnnnnnnnnnnnnnnnnnnnnnnnnnnnnnnnnnnnnnnnnnnnnnnnnnnnnnnnnnnnnnnnnnnnnnnnnnnnnnnnnnnnnnnnnnnnnnnnnnnnnnnnnnnnnnnnnnnnnnnnnnnnnnnnnnnnnnnnnnnnnnnnnnnnnnnnnnnnnnnnnnnnnnnnnnnnnnnnnnnnnnnnnnnnnnnnnnnnnnnnnnnnnnnnnnnnnnnnnnnnnnnnnnnnnnnnnnnnnnnnnnnnnnnnnnnnnnnnnnnnnnnnnnnnnnnnnnnnnnnnnnnnnnnnnnnnnnnnnnnnnnnnnnnnnnnnnnnnnnnnnnnnnnnnnnnnnnnnnnnnnnnnnnnnnnnnnnnnnnnnnnnnnnnnnnnnnnnnnnnnnnnnnnnnnnnnnnnnnnnnnnnnnnnnnnnnnnnnnnnnnnnnnnnnnnnnnnnnnnnnnnnnnnnnnnnnnnnnnnnnnnnnnnnnnnnnnnnnnnnnnnnnnnnnnnnnnnnnnnnnnnnnnnnnnnnnnnnnnnnnnnnnnnnnnnnnnnnnnnnnnnnnnnnnnnnnnnnnnnnnnnnnnnnnnnnnnnnnnnnnnnnnnnnnnnnnnnnnnnnnnnnnnnnnnnnnnnnnnnnnnnnnnnnnnnnnnnnnnnnnnnnnnnnnnnnnnnnnnnnnnnnnnnnnnnnnnnnnnnnnnnnnnnnnnnnnnnnnnnnnnnnnnnnnnnnnnnnnnnnnnnnnnnnnnnnnnnnnnnnnnnnnnnnnnnnnnnnnnnnnnnnnnnnnnnnnnnnnnnnnnnnnnnnnnnnnnnnnnnnnnnnnnnnnnnnnnnnnnnnnnnnnnnnnnnnnnnnnnnnnnnnnnnnnnnnnnnnnnnnnnnnnnnnnnnnnnnnnnnnnnnnnnnnnnnnnnnnnnnnnnnnnnnnnnnnnnnnnnnnnnnnnnnnnnnnnnnnnnnnnnnnnnnnnnnnnnnnnnnnnnnnnnnnnnnnnnnnnnnnnnnnnnnnnnnnnnnnnnnnnnnnnnnnnnnnnnnnnnnnnnnnnnnnnnnnnnnnnnnnnnnnnnnnnnnnnnnnnnnnnnnnnnnnnnnnnnnnnnnnnnnnnnnnnnnnnnnnnnnnnnnnnnnnnnnnnnnnnnnnnnnnnnnnnnnnnnnnnnnnnnnnnnnnnnnnnnnnnnnnnnnnnnnnnnnnnnnnnnnnnnnnnnnnnnnnnnnnnnnnnnnnnnnnnnnnnnnnnnnnnnnnnnnnnnnnnnnnnnnnnnnnnnnnnnnnnnnnnnnnnnnnnnnnnnnnnnnnnnnnnnnnnnnnnnnnnnnnnnnnnnnnnnnnnnnnnnnnnnnnnnnnnnnnnnnnnnnnnnnnnnnnnnnnnnnnnnnnnnnnnnnnnnnnnnnnnnnnnnnnnnnnnnnnnnnnnnnnnnnnnnnnnnnnnnnnnnnnnnnnnnnnnnnnnnnnnnnnnnnnnnnnnnnnnnnnnnnnnnnnnnnnnnnnnnnnnnnnnnnnnnnnnnnnnnnnnnnnnnnnnnnnnnnnnnnnnnnnnnnnnnnnnnnnnnnnnnnnnnnnnnnnnnnnnnnnnnnnnnnnnnnnnnnnnnnnnnnnnnnnnnnnnnnnnnnnnnnnnnnnnnnnnnnnnnnnnnnnnnnnnnnnnnnnnnnnnnnnnnnnnnnnnnnnnnnnnnnnnnnnnnnnnnnnnnnnnnnnnnnnnnnnnnnnnnnnnnnnnnnnnnnnnnnnnnnnnnnnnnnnnnnnnnnnnnnnnnnnnnnnnnnnnnnnnnnnnnnnnnnnnnnnnnnnnnnnnnnnnnnnnnnnnnnnnnnnnnnnnnnnnnnnnnnnnnnnnnnnnnnnnnnnnnnnnnnnnnnnnnnnnnnnnnnnnnnnnnnnnnnnnnnnnnnnnnnnnnnnnnnnnnnnnnnnnnnnnnnnnnnnnnnnnnnnnnnnnnnnnnnnnnnnnnnnnnnnnnnnnnnnnnnnnnnnnnnnnnnnnnnnnnnnnnnnnnnnnnnnnnnnnnnnnnnnnnnnnnnnnnnnnnnnnnnnnnnnnnnnnnnnnnnnnnnnnnnnnnnnnnnnnnnnnnnnnnnnnnnnnnnnnnnnnnnnnnnnnnnnnnnnnnnnnnnnnnnnnnnnnnnnnnnnnnnnnnnnnnnnnnnnnnnnnnnnnnnnnnnnnnnnnnnnnnnnnnnnnnnnnnnnnnnnnnnnnnnnnnnnnnnnnnnnnnnnnnnnnnnnnnnnnnnnnnnnnnnnnnnnnnnnnnnnnnnnnnnnnnnnnnnnnnnnnnnnnnnnnnnnnnnnnnnnnnnnnnnnnnnnnnnnnnnnnnnnnnnnnnnnnnnnnnnnnnnnnnnnnnnnnnnnnnnnnnnnnnnnnnnnnnnnnnnnnnnnnnnnnnnnnnnnnnnnnnnnnnnnnnnnnnnnnnnnnnnnnnnnnnnnnnnnnnnnnnnnnnnnnnnnnnnnnnnnnnnnnnnnnnnnnnnnnnnnnnnnnnnnnnnnnnnnnnnnnnnnnnnnnnnnnnnnnnnnnnnnnnnnnnnnnnnnnnnnnnnnnnnnnnnnnnnnnnnnnnnnnnnnnnnnnnnnnnnnnnnnnnnnnnnnnnnnnnnnnnnnnnnnnnnnnnnnnnnnnnnnnnnnnnnnnnnnnnnnnnnnnnnnnnnnnnnnnnnnnnnnnnnnnnnnnnnnnnnnnnnnnnnnnnnnnnnnnnnnnnnnnnnnnnnnnnnnnnnnnnnnnnnnnnnnnnnnnnnnnnnnnnnnnnnnnnnnnnnnnnnnnnnnnnnnnnnnnnnnnnnnnnnnnnnnnnnnnnnnnnnnnnnnnnnnnnnnnnnnnnnnnnnnnnnnnnnnnnnnnnnnnnnnnnnnnnnnnnnnnnnnnnnnnnnnnnnnnnnnnnnnnnnnnnnnnnnnnnnnnnnnnnnnnnnnnnnnnnnnnnnnnnnnnnnnnnnnnnnnnnnnnnnnnnnnnnnnnnnnnnnnnnnnnnnnnnnnnnnnnnnnnnnnnnnnnnnnnnnnnnnnnnnnnnnnnnnnnnnnnnnnnnnnnnnnnnnnnnnnnnnnnnnnnnnnnnnnnnnnnnnnnnnnnnnnnnnnnnnnnnnnnnnnnnnnnnnnnnnnnnnnnnnnnnnnnnnnnnnnnnnnnnnnnnnnnnnnnnnnnnnnnnnnnnnnnnnnnnnnnnnnnnnnnnnnnnnnnnnnnnnnnnnnnnnnnnnnnnnnnnnnnnnnnnnnnnnnnnnnnnnnnnnnnnnnnnnnnnnnnnnnnnnnnnnnnnnnnnnnnnnnnnnnnnnnnnnnnnnnnnnnnnnnnnnnnnnnnnnnnnnnnnnnnnnnnnnnnnnnnnnnnnnnnnnnnnnnnnnnnnnnnnnnnnnnnnnnnnnnnnnnnnnnnnnnnnnnnnnnnnnnnnnnnnnnnnnnnnnnnnnnnnnnnnnnnnnnnnnnnnnnnnnnnnnnnnnnnnnnnnnnnnnnnnnnnnnnnnnnnnnnnnnnnnnnnnnnnnnnnnnnnnnnnnnnnnnnnnnnnnnnnnnnnnnnnnnnnnnnnnnnnnnnnnnnnnnnnnnnnnnnnnnnnnnnnnnnnnnnnnnnnnnnnnnnnnnnnnnnnnnnnnnnnnnnnnnnnnnnnnnnnnnnnnnnnnnnnnnnnnnnnnnnnnnnnnnnnnnnnnnnnnnnnnnnnnnnnnnnnnnnnnnnnnnnnnnnnnnnnnnnnnnnnnnnnnnnnnnnnnnnnnnnnnnnnnnnnnnnnnnnnnnnnnnnnnnnnnnnnnnnnnnnnnnnnnnnnnnnnnnnnnnnnnnnnnnnnnnnnnnnnnnnnnnnnnnnnnnnnnnnnnnnnnnnnnnnnnnnnnnnnnnnnnnnnnnnnnnnnnnnnnnnnnnnnnnnnnnnnnnnnnnnnnnnnnnnnnnnnnnnnnnnnnnnnnnnnnnnnnnnnnnnnnnnnnnnnnnnnnnnnnnnnnnnnnnnnnnnnnnnnnnnnnnnnnnnnnnnnnnnnnnnnnnnnnnnnnnnnnnnnnnnnnnnnnnnnnnnnnnnnnnnnnnnnnnnnnnnnnnnnnnnnnnnnnnnnnnnnnnnnnnnnnnnnnnnnnnnnnnnnnnnnnnnnnnnnnnnnnnnnnnnnnnnnnnnnnnnnnnnnnnnnnnnnnnnnnnnnnnnnnnnnnnnnnnnnnnnnnnnnnnnnnnnnnnnnnnnnnnnnnnnnnnnnnnnnnnnnnnnnnnnnnnnnnnnnnnnnnnnnnnnnnnnnnnnnnnnnnnnnnnnnnnnnnnnnnnnnnnnnnnnnnnnnnnnnnnnnnnnnnnnnnnnnnnnnnnnnnnnnnnnnnnnnnnnnnnnnnnnnnnnnnnnnnnnnnnnnnnnnnnnnnnnnnnnnnnnnnnnnnnnnnnnnnnnnnnnnnnnnnnnnnnnnnnnnnnnnnnnnnnnnnnnnnnnnnnnnnnnnnnnnnnnnnnnnnnnnnnnnnnnnnnnnnnnnnnnnnnnnnnnnnnnnnnnnnnnnnnnnnnnnnnnnnnnnnnnnnnnnnnnnnnnnnnnnnnnnnnnnnnnnnnnnnnnnnnnnnnnnnnnnnnnnnnnnnnnnnnnnnnnnnnnnnnnnnnnnnnnnnnnnnnnnnnnnnnnnnnnnnnnnnnnnnnnnnnnnnnnnnnnnnnnnnnnnnnnnnnnnnnnnnnnnnnnnnnnnnnnnnnnnnnnnnnnnnnnnnnnnnnnnnnnnnnnnnnnnnnnnnnnnnnnnnnnnnnnnnnnnnnnnnnnnnnnnnnnnnnnnnnnnnnnnnnnnnnnnnnnnnnnnnnnnnnnnnnnnnnnnnnnnnnnnnnnnnnnnnnnnnnnnnnnnnnnnnnnnnnnnnnnnnnnnnnnnnnnnnnnnnnnnnnnnnnnnnnnnnnnnnnnnnnnnnnnnnnnnnnnnnnnnnnnnnnnnnnnnnnnnnnnnnnnnnnnnnnnnnnnnnnnnnnnnnnnnnnnnnnnnnnnnnnnnnnnnnnnnnnnnnnnnnnnnnnnnnnnnnnnnnnnnnnnnnnnnnnnnnnnnnnnnnnnnnnnnnnnnnnnnnnnnnnnnnnnnnnnnnnnnnnnnnnnnnnnnnnnnnnnnnnnnnnnnnnnnnnnnnnnnnnnnnnnnnnnnnnnnnnnnnnnnnnnnnnnnnnnnnnnnnnnnnnnnnnnnnnnnnnnnnnnnnnnnnnnnnnnnnnnnnnnnnnnnnnnnnnnnnnnnnnnnnnnnnnnnnnnnnnnnnnnnnnnnnnnnnnnnnnnnnnnnnnnnnnnnnnnnnnnnnnnnnnnnnnnnnnnnnnnnnnnnnnnnnnnnnnnnnnnnnnnnnnnnnnnnnnnnnnnnnnnnnnnnnnnnnnnnnnnnnnnnnnnnnnnnnnnnnnnnnnnnnnnnnnnnnnnnnnnnnnnnnnnnnnnnnnnnnnnnnnnnnnnnnnnnnnnnnnnnnnnnnnnnnnnnnnnnnnnnnnnnnnnnnnnnnnnnnnnnnnnnnnnnnnnnnnnnnnnnnnnnnnnnnnnnnnnnnnnnnnnnnnnnnnnnnnnnnnnnnnnnnnnnnnnnnnnnnnnnnnnnnnnnnnnnnnnnnnnnnnnnnnnnnnnnnnnnnnnnnnnnnnnnnnnnnnnnnnnnnnnnnnnnnnnnnnnnnnnnnnnnnnnnnnnnnnnnnnnnnnnnnnnnnnnnnnnnnnnnnnnnnnnnnnnnnnnnnnnnnnnnnnnnnnnnnnnnnnnnnnnnnnnnnnnnnnnnnnnnnnnnnnnnnnnnnnnnnnnnnnnnnnnnnnnnnnnnnnnnnnnnnnnnnnnnnnnnnnnnnnnnnnnnnnnnnnnnnnnnnnnnnnnnnnnnnnnnnnnnnnnnnnnnnnnnnnnnnnnnnnnnnnnnnnnnnnnnnnnnnnnnnnnnnnnnnnnnnnnnnnnnnnnnnnnnnnnnnnnnnnnnnnnnnnnnnnnnnnnnnnnnnnnnnnnnnnnnnnnnnnnnnnnnnnnnnnnnnnnnnnnnnnnnnnnnnnnnnnnnnnnnnnnnnnnnnnnnnnnnnnnnnnnnnnnnnnnnnnnnnnnnnnnnnnnnnnnnnnnnnnnnnnnnnnnnnnnnnnnnnnnnnnnnnnnnnnnnnnnnnnnnnnnnnnnnnnnnnnnnnnnnnnnnnnnnnnnnnnnnnnnnnnnnnnnnnnnnnnnnnnnnnnnnnnnnnnnnnnnnnnnnnnnnnnnnnnnnnnnnnnnnnnnnnnnnnnnnnnnnnnnnnnnnnnnnnnnnnnnnnnnnnnnnnnnnnnnnnnnnnnnnnnnnnnnnnnnnnnnnnnnnnnnnnnnnnnnnnnnnnnnnnnnnnnnnnnnnnnnnnnnnnnnnnnnnnnnnnnnnnnnnnnnnnnnnnnnnnnnnnnnnnnnnnnnnnnnnnnnnnnnnnnnnnnnnnnnnnnnnnnnnnnnnnnnnnnnnnnnnnnnnnnnnnnnnnnnnnnnnnnnnnnnnnnnnnnnnnnnnnnnnnnnnnnnnnnnnnnnnnnnnnnnnnnnnnnnnnnnnnnnnnnnnnnnnnnnnnnnnnnnnnnnnnnnnnnnnnnnnnnnnnnnnnnnnnnnnnnnnnnnnnnnnnnnnnnnnnnnnnnnnnnnnnnnnnnnnnnnnnnnnnnnnnnnnnnnnnnnnnnnnnnnnnnnnnnnnnnnnnnnnnnnnnnnnnnnnnnnnnnnnnnnnnnnnnnnnnnnnnnnnnnnnnnnnnnnnnnnnnnnnnnnnnnnnnnnnnnnnnnnnnnnnnnnnnnnnnnnnnnnnnnnnnnnnnnnnnnnnnnnnnnnnnnnnnnnnnnnnnnnnnnnnnnnnnnnnnnnnnnnnnnnnnnnnnnnnnnnnnnnnnnnnnnnnnnnnnnnnnnnnnnnnnnnnnnnnnnnnnnnnnnnnnnnnnnnnnnnnnnnnnnnnnnnnnnnnnnnnnnnnnnnnnnnnnnnnnnnnnnnnnnnnnnnnnnnnnnnnnnnnnnnnnnnnnnnnnnnnnnnnnnnnnnnnnnnnnnnnnnnnnnnnnnnnnnnnnnnnnnnnnnnnnnnnnnnnnnnnnnnnnnnnnnnnnnnnnnnnnnnnnnnnnnnnnnnnnnnnnnnnnnnnnnnnnnnnnnnnnnnnnnnnnnnnnnnnnnnnnnnnnnnnnnnnnnnnnnnnnnnnnnnnnnnnnnnnnnnnnnnnnnnnnnnnnnnnnnnnnnnnnnnnnnnnnnnnnnnnnnnnnnnnnnnnnnnnnnnnnnnnnnnnnnnnnnnnnnnnnnnnnnnnnnnnnnnnnnnnnnnnnnnnnnnnnnnnnnnnnnnnnnnnnnnnnnnnnnnnnnnnnnnnnnnnnnnnnnnnnnnnnnnnnnnnnnnnnnnnnnnnnnnnnnnnnnnnnnnnnnnnnnnnnnnnnnnnnnnnnnnnnnnnnnnnnnnnnnnnnnnnnnnnnnnnnnnnnnnnnnnnnnnnnnnnnnnnnnnnnnnnnnnnnnnnnnnnnnnnnnnnnnnnnnnnnnnnnnnnnnnnnnnnnnnnnnnnnnnnnnnnnnnnnnnnnnnnnnnnnnnnnnnnnnnnnnnnnnnnnnnnnnnnnnnnnnnnnnnnnnnnnnnnnnnnnnnnnnnnnnnnnnnnnnnnnnnnnnnnnnnnnnnnnnnnnnnnnnnnnnnnnnnnnnnnnnnnnnnnnnnnnnnnnnnnnnnnnnnnnnnnnnnnnnnnnnnnnnnnnnnnnnnnnnnnnnnnnnnnnnnnnnnnnnnnnnnnnnnnnnnnnnnnnnnnnnnnnnnnnnnnnnnnnnnnnnnnnnnnnnnnnnnnnnnnnnnnnnnnnnnnnnnnnnnnnnnnnnnnnnnnnnnnnnnnnnnnnnnnnnnnnnnnnnnnnnnnnnnnnnnnnnnnnnnnnnnnnnnnnnnnnnnnnnnnnnnnnnnnnnnnnnnnnnnnnnnnnnnnnnnnnnnnnnnnnnnnnnnnnnnnnnnnnnnnnnnnnnnnnnnnnnnnnnnnnnnnnnnnnnnnnnnnnnnnnnnnnnnnnnnnnnnnnnnnnnnnnnnnnnnnnnnnnnnnnnnnnnnnnnnnnnnnnnnnnnnnnnnnnnnnnnnnnnnnnnnnnnnnnnnnnnnnnnnnnnnnnnnnnnnnnnnnnnnnnnnnnnnnnnnnnnnnnnnnnnnnnnnnnnnnnnnnnnnnnnnnnnnnnnnnnnnnnnnnnnnnnnnnnnnnnnnnnnnnnnnnnnnnnnnnnnnnnnnnnnnnnnnnnnnnnnnnnnnnnnnnnnnnnnnnnnnnnnnnnnnnnnnnnnnnnnnnnnnnnnnnnnnnnnnnnnnnnnnnnnnnnnnnnnnnnnnnnnnnnnnnnnnnnnnnnnnnnnnnnnnnnnnnnnnnnnnnnnnnnnnnnnnnnnnnnnnnnnnnnnnnnnnnnnnnnnnnnnnnnnnnnnnnnnnnnnnnnnnnnnnnnnnnnnnnnnnnnnnnnnnnnnnnnnnnnnnnnnnnnnnnnnnnnnnnnnnnnnnnnnnnnnnnnnnnnnnnnnnnnnnnnnnnnnnnnnnnnnnnnnnnnnnnnnnnnnnnnnnnnnnnnnnnnnnnnnnnnnnnnnnnnnnnnnnnnnnnnnnnnnnnnnnnnnnnnnnnnnnnnnnnnnnnnnnnnnnnnnnnnnnnnnnnnnnnnnnnnnnnnnnnnnnnnnnnnnnnnnnnnnnnnnnnnnnnnnnnnnnnnnnnnnnnnnnnnnnnnnnnnnnnnnnnnnnnnnnnnnnnnnnnnnnnnnnnnnnnnnnnnnnnnnnnnnnnnnnnnnnnnnnnnnnnnnnnnnnnnnnnnnnnnnnnnnnnnnnnnnnnnnnnnnnnnnnnnnnnnnnnnnnnnnnnnnnnnnnnnnnnnnnnnnnnnnnnnnnnnnnnnnnnnnnnnnnnnnnnnnnnnnnnnnnnnnnnnnnnnnnnnnnnnnnnnnnnnnnnnnnnnnnnnnnnnnnnnnnnnnnnnnnnnnnnnnnnnnnnnnnnnnnnnnnnnnnnnnnnnnnnnnnnnnnnnnnnnnnnnnnnnnnnnnnnnnnnnnnnnnnnnnnnnnnnnnnnnnnnnnnnnnnnnnnnnnnnnnnnnnnnnnnnnnnnnnnnnnnnnnnnnnnnnnnnnnnnnnnnnnnnnnnnnnnnnnnnnnnnnnnnnnnnnnnnnnnnnnnnnnnnnnnnnnnnnnnnnnnnnnnnnnnnnnnnnnnnnnnnnnnnnnnnnnnnnnnnnnnnnnnnnnnnnnnnnnnnnnnnnnnnnnnnnnnnnnnnnnnnnnnnnnnnnnnnnnnnnnnnnnnnnnnnnnnnnnnnnnnnnnnnnnnnnnnnnnnnnnnnnnnnnnnnnnnnnnnnnnnnnnnnnnnnnnnnnnnnnnnnnnnnnnnnnnnnnnnnnnnnnnnnnnnnnnnnnnnnnnnnnnnnnnnnnnnnnnnnnnnnnnnnnnnnnnnnnnnnnnnnnnnnnnnnnnnnnnnnnnnnnnnnnnnnnnnnnnnnnnnnnnnnnnnnnnnnnnnnnnnnnnnnnnnnnnnnnnnnnnnnnnnnnnnnnnnnnnnnnnnnnnnnnnnnnnnnnnnnnnnnnnnnnnnnnnnnnnnnnnnnnnnnnnnnnnnnnnnnnnnnnnnnnnnnnnnnnnnnnnnnnnnnnnnnnnnnnnnnnnnnnnnnnnnnnnnnnnnnnnnnnnnnnnnnnnnnnnnnnnnnnnnnnnnnnnnnnnnnnnnnnnnnnnnnnnnnnnnnnnnnnnnnnnnnnnnnnnnnnnnnnnnnnnnnnnnnnnnnnnnnnnnnnnnnnnnnnnnnnnnnnnnnnnnnnnnnnnnnnnnnnnnnnnnnnnnnnnnnnnnnnnnnnnnnnnnnnnnnnnnnnnnnnnnnnnnnnnnnnnnnnnnnnnnnnnnnnnnnnnnnnnnnnnnnnnnnnnnnnnnnnnnnnnnnnnnnnnnnnnnnnnnnnnnnnnnnnnnnnnnnnnnnnnnnnnnnnnnnnnnnnnnnnnnnnnnnnnnnnnnnnnnnnnnnnnnnnnnnnnnnnnnnnnnnnnnnnnnnnnnnnnnnnnnnnnnnnnnnnnnnnnnnnnnnnnnnnnnnnnnnnnnnnnnnnnnnnnnnnnnnnnnnnnnnnnnnnnnnnnnnnnnnnnnnnnnnnnnnnnnnnnnnnnnnnnnnnnnnnnnnnnnnnnnnnnnnnnnnnnnnnnnnnnnnnnnnnnnnnnnnnnnnnnnnnnnnnnnnnnnnnnnnnnnnnnnnnnnnnnnnnnnnnnnnnnnnnnnnnnnnnnnnnnnnnnnnnnnnnnnnnnnnnnnnnnnnnnnnnnnnnnnnnnnnnnnnnnnnnnnnnnnnnnnnnnnnnnnnnnnnnnnnnnnnnnnnnnnnnnnnnnnnnnnnnnnnnnnnnnnnnnnnnnnnnnnnnnnnnnnnnnnnnnnnnnnnnnnnnnnnnnnnnnnnnnnnnnnnnnnnnnnnnnnnnnnnnnnnnnnnnnnnnnnnnnnnnnnnnnnnnnnnnnnnnnnnnnnnnnnnnnnnnnnnnnnnnnnnnnnnnnnnnnnnnnnnnnnnnnnnnnnnnnnnnnnnnnnnnnnnnnnnnnnnnnnnnnnnnnnnnnnnnnnnnnnnnnnnnnnnnnnnnnnnnnnnnnnnnnnnnnnnnnnnnnnnnnnnnnnnnnnnnnnnnnnnnnnnnnnnnnnnnnnnnnnnnnnnnnnnnnnnnnnnnnnnnnnnnnnnnnnnnnnnnnnnnnnnnnnnnnnnnnnnnnnnnnnnnnnnnnnnnnnnnnnnnnnnnnnnnnnnnnnnnnnnnnnnnnnnnnnnnnnnnnnnnnnnnnnnnnnnnnnnnnnnnnnnnnnnnnnnnnnnnnnnnnnnnnnnnnnnnnnnnnnnnnnnnnnnnnnnnnnnnnnnnnnnnnnnnnnnnnnnnnnnnnnnnnnnnnnnnnnnnnnnnnnnnnnnnnnnnnnnnnnnnnnnnnnnnnnnnnnnnnnnnnnnnnnnnnnnnnnnnnnnnnnnnnnnnnnnnnnnnnnnnnnnnnnnnnnnnnnnnnnnnnnnnnnnnnnnnnnnnnnnnnnnnnnnnnnnnnnnnnnnnnnnnnnnnnnnnnnnnnnnnnnnnnnnnnnnnnnnnnnnnnnnnnnnnnnnnnnnnnnnnnnnnnnnnnnnnnnnnnnnnnnnnnnnnnnnnnnnnnnnnnnnnnnnnnnnnnnnnnnnnnnnnnnnnnnnnnnnnnnnnnnnnnnnnnnnnnnnnnnnnnnnnnnnnnnnnnnnnnnnnnnnnnnnnnnnnnnnnnnnnnnnnnnnnnnnnnnnnnnnnnnnnnnnnnnnnnnnnnnnnnnnnnnnnnnnnnnnnnnnnnnnnnnnnnnnnnnnnnnnnnnnnnnnnnnnnnnnnnnnnnnnnnnnnnnnnnnnnnnnnnnnnnnnnnnnnnnnnnnnnnnnnnnnnnnnnnnnnnnnnnnnnnnnnnnnnnnnnnnnnnnnnnnnnnnnnnnnnnnnnnnnnnnnnnnnnnnnnnnnnnnnnnnnnnnnnnnnnnnnnnnnnnnnnnnnnnnnnnnnnnnnnnnnnnnnnnnnnnnnnnnnnnnnnnnnnnnnnnnnnnnnnnnnnnnnnnnnnnnnnnnnnnnnnnnnnnnnnnnnnnnnnnnnnnnnnnnnnnnnnnnnnnnnnnnnnnnnnnnnnnnnnnnnnnnnnnnnnnnnnnnnnnnnnnnnnnnnnnnnnnnnnnnnnnnnnnnnnnnnnnnnnnnnnnnnnnnnnnnnnnnnnnnnnnnnnnnnnnnnnnnnnnnnnnnnnnnnnnnnnnnnnnnnnnnnnnnnnnnnnnnnnnnnnnnnnnnnnnnnnnnnnnnnnnnnnnnnnnnnnnnnnnnnnnnnnnnnnnnnnnnnnnnnnnnnnnnnnnnnnnnnnnnnnnnnnnnnnnnnnnnnnnnnnnnnnnnnnnnnnnnnnnnnnnnnnnnnnnnnnnnnnnnnnnnnnnnnnnnnnnnnnnnnnnnnnnnnnnnnnnnnnnnnnnnnnnnnnnnnnnnnnnnnnnnnnnnnnnnnnnnnnnnnnnnnnnnnnnnnnnnnnnnnnnnnnnnnnnnnnnnnnnnnnnnnnnnnnnnnnnnnnnnnnnnnnnnnnnnnnnnnnnnnnnnnnnnnnnnnnnnnnnnnnnnnnnnnnnnnnnnnnnnnnnnnnnnnnnnnnnnnnnnnnnnnnnnnnnnnnnnnnnnnnnnnnnnnnnnnnnnnnnnnnnnnnnnnnnnnnnnnnnnnnnnnnnnnnnnnnnnnnnnnnnnnnnnnnnnnnnnnnnnnnnnnnnnnnnnnnnnnnnnnnnnnnnnnnnnnnnnnnnnnnnnnnnnnnnnnnnnnnnnnnnnnnnnnnnnnnnnnnnnnnnnnnnnnnnnnnnnnnnnnnnnnnnnnnnnnnnnnnnnnnnnnnnnnnnnnnnnnnnnnnnnnnnnnnnnnnnnnnnnnnnnnnnnnnnnnnnnnnnnnnnnnnnnnnnnnnnnnnnnnnnnnnnnnnnnnnnnnnnnnnnnnnnnnnnnnnnnnnnnnnnnnnnnnnnnnnnnnnnnnnnnnnnnnnnnnnnnnnnnnnnnnnnnnnnnnnnnnnnnnnnnnnnnnnnnnnnnnnnnnnnnnnnnnnnnnnnnnnnnnnnnnnnnnnnnnnnnnnnnnnnnnnnnnnnnnnnnnnnnnnnnnnnnnnnnnnnnnnnnnnnnnnnnnnnnnnnnnnnnnnnnnnnnnnnnnnnnnnnnnnnnnnnnnnnnnnnnnnnnnnnnnnnnnnnnnnnnnnnnnnnnnnnnnnnnnnnnnnnnnnnnnnnnnnnnnnnnnnnnnnnnnnnnnnnnnnnnnnnnnnnnnnnnnnnnnnnnnnnnnnnnnnnnnnnnnnnnnnnnnnnnnnnnnnnnnnnnnnnnnnnnnnnnnnnnnnnnnnnnnnnnnnnnnnnnnnnnnnnnnnnnnnnnnnnnnnnnnnnnnnnnnnnnnnnnnnnnnnnnnnnnnnnnnnnnnnnnnnnnnnnnnnnnnnnnnnnnnnnnnnnnnnnnnnnnnnnnnnnnnnnnnnnnnnnnnnnnnnnnnnnnnnnnnnnnnnnnnnnnnnnnnnnnnnnnnnnnnnnnnnnnnnnnnnnnnnnnnnnnnnnnnnnnnnnnnnnnnnnnnnnnnnnnnnnnnnnnnnnnnnnnnnnnnnnnnnnnnnnnnnnnnnnnnnnnnnnnnnnnnnnnnnnnnnnnnnnnnnnnnnnnnnnnnnnnnnnnnnnnnnnnnnnnnnnnnnnnnnnnnnnnnnnnnnnnnnnnnnnnnnnnnnnnnnnnnnnnnnnnnnnnnnnnnnnnnnnnnnnnnnnnnnnnnnnnnnnnnnnnnnnnnnnnnnnnnnnnnnnnnnnnnnnnnnnnnnnnnnnnnnnnnnnnnnnnnnnnnnnnnnnnnnnnnnnnnnnnnnnnnnnnnnnnnnnnnnnnnnnnnnnnnnnnnnnnnnnnnnnnnnnnnnnnnnnnnnnnnnnnnnnnnnnnnnnnnnnnnnnnnnnnnnnnnnnnnnnnnnnnnnnnnnnnnnnnnnnnnnnnnnnnnnnnnnnnnnnnnnnnnnnnnnnnnnnnnnnnnnnnnnnnnnnnnnnnnnnnnnnnnnnnnnnnnnnnnnnnnnnnnnnnnnnnnnnnnnnnnnnnnnnnnnnnnnnnnnnnnnnnnnnnnnnnnnnnnnnnnnnnnnnnnnnnnnnnnnnnnnnnnnnnnnnnnnnnnnnnnnnnnnnnnnnnnnnnnnnnnnnnnnnnnnnnnnnnnnnnnnnnnnnnnnnnnnnnnnnnnnnnnnnnnnnnnnnnnnnnnnnnnnnnnnnnnnnnnnnnnnnnnnnnnnnnnnnnnnnnnnnnnnnnnnnnnnnnnnnnnnnnnnnnnnnnnnnnnnnnnnnnnnnnnnnnnnnnnnnnnnnnnnnnnnnnnnnnnnnnnnnnnnnnnnnnnnnnnnnnnnnnnnnnnnnnnnnnnnnnnnnnnnnnnnnnnnnnnnnnnnnnnnnnnnnnnnnnnnnnnnnnnnnnnnnnnnnnnnnnnnnnnnnnnnnnnnnnnnnnnnnnnnnnnnnnnnnnnnnnnnnnnnnnnnnnnnnnnnnnnnnnnnnnnnnnnnnnnnnnnnnnnnnnnnnnnnnnnnnnnnnnnnnnnnnnnnnnnnnnnnnnnnnnnnnnnnnnnnnnnnnnnnnnnnnnnnnnnnnnnnnnnnnnnnnnnnnnnnnnnnnnnnnnnnnnnnnnnnnnnnnnnnnnnnnnnnnnnnnnnnnnnnnnnnnnnnnnnnnnnnnnnnnnnnnnnnnnnnnnnnnnnnnnnnnnnnnnnnnnnnnnnnnnnnnnnnnnnnnnnnnnnnnnnnnnnnnnnnnnnnnnnnnnnnnnnnnnnnnnnnnnnnnnnnnnnnnnnnnnnnnnnnnnnnnnnnnnnnnnnnnnnnnnnnnnnnnnnnnnnnnnnnnnnnnnnnnnnnnnnnnnnnnnnnnnnnnnnnnnnnnnnnnnnnnnnnnnnnnnnnnnnnnnnnnnnnnnnnnnnnnnnnnnnnnnnnnnnnnnnnnnnnnnnnnnnnnnnnnnnnnnnnnnnnnnnnnnnnnnnnnnnnnnnnnnnnnnnnnnnnnnnnnnnnnnnnnnnnnnnnnnnnnnnnnnnnnnnnnnnnnnnnnnnnnnnnnnnnnnnnnnnnnnnnnnnnnnnnnnnnnnnnnnnnnnnnnnnnnnnnnnnnnnnnnnnnnnnnnnnnnnnnnnnnnnnnnnnnnnnnnnnnnnnnnnnnnnnnnnnnnnnnnnnnnnnnnnnnnnnnnnnnnnnnnnnnnnnnnnnnnnnnnnnnnnnnnnnnnnnnnnnnnnnnnnnnnnnnnnnnnnnnnnnnnnnnnnnnnnnnnnnnnnnnnnnnnnnnnnnnnnnnnnnnnnnnnnnnnnnnnnnnnnnnnnnnnnnnnnnnnnnnnnnnnnnnnnnnnnnnnnnnnnnnnnnnnnnnnnnnnnnnnnnnnnnnnnnnnnnnnnnnnnnnnnnnnnnnnnnnnnnnnnnnnnnnnnnnnnnnnnnnnnnnnnnnnnnnnnnnnnnnnnnnnnnnnnnnnnnnnnnnnnnnnnnnnnnnnnnnnnnnnnnnnnnnnnnnnnnnnnnnnnnnnnnnnnnnnnnnnnnnnnnnnnnnnnnnnnnnnnnnnnnnnnnnnnnnnnnnnnnnnnnnnnnnnnnnnnnnnnnnnnnnnnnnnnnnnnnnnnnnnnnnnnnnnnnnnnnnnnnnnnnnnnnnnnnnnnnnnnnnnnnnnnnnnnnnnnnnnnnnnnnnnnnnnnnnnnnnnnnnnnnnnnnnnnnnnnnnnnnnnnnnnnnnnnnnnnnnnnnnnnnnnnnnnnnnnnnnnnnnnnnnnnnnnnnnnnnnnnnnnnnnnnnnnnnnnnnnnnnnnnnnnnnnnnnnnnnnnnnnnnnnnnnnnnnnnnnnnnnnnnnnnnnnnnnnnnnnnnnnnnnnnnnnnnnnnnnnnnnnnnnnnnnnnnnnnnnnnnnnnnnnnnnnnnnnnnnnnnnnnnnnnnnnnnnnnnnnnnnnnnnnnnnnnnnnnnnnnnnnnnnnnnnnnnnnnnnnnnnnnnnnnnnnnnnnnnnnnnnnnnnnnnnnnnnnnnnnnnnnnnnnnnnnnnnnnnnnnnnnnnnnnnnnnnnnnnnnnnnnnnnnnnnnnnnnnnnnnnnnnnnnnnnnnnnnnnnnnnnnnnnnnnnnnnnnnnnnnnnnnnnnnnnnnnnnnnnnnnnnnnnnnnnnnnnnnnnnnnnnnnnnnnnnnnnnnnnnnnnnnnnnnnnnnnnnnnnnnnnnnnnnnnnnnnnnnnnnnnnnnnnnnnnnnnnnnnnnnnnnnnnnnnnnnnnnnnnnnnnnnnnnnnnnnnnnnnnnnnnnnnnnnnnnnnnnnnnnnnnnnnnnnnnnnnnnnnnnnnnnnnnnnnnnnnnnnnnnnnnnnnnnnnnnnnnnnnnnnnnnnnnnnnnnnnnnnnnnnnnnnnnnnnnnnnnnnnnnnnnnnnnnnnnnnnnnnnnnnnnnnnnnnnnnnnnnnnnnnnnnnnnnnnnnnnnnnnnnnnnnnnnnnnnnnnnnnnnnnnnnnnnnnnnnnnnnnnnnnnnnnnnnnnnnnnnnnnnnnnnnnnnnnnnnnnnnnnnnnnnnnnnnnnnnnnnnnnnnnnnnnnnnnnnnnnnnnnnnnnnnnnnnnnnnnnnnnnnnnnnnnnnnnnnnnnnnnnnnnnnnnnnnnnnnnnnnnnnnnnnnnnnnnnnnnnnnnnnnnnnnnnnnnnnnnnnnnnnnnnnnnnnnnnnnnnnnnnnnnnnnnnnnnnnnnnnnnnnnnnnnnnnnnnnnnnnnnnnnnnnnnnnnnnnnnnnnnnnnnnnnnnnnnnnnnnnnnnnnnnnnnnnnnnnnnnnnnnnnnnnnnnnnnnnnnnnnnnnnnnnnnnnnnnnnnnnnnnnnnnnnnnnnnnnnnnnnnnnnnnnnnnnnnnnnnnnnnnnnnnnnnnnnnnnnnnnnnnnnnnnnnnnnnnnnnnnnnnnnnnnnnnnnnnnnnnnnnnnnnnnnnnnnnnnnnnnnnnnnnnnnnnnnnnnnnnnnnnnnnnnnnnnnnnnnnnnnnnnnnnnnnnnnnnnnnnnnnnnnnnnnnnnnnnnnnnnnnnnnnnnnnnnnnnnnnnnnnnnnnnnnnnnnnnnnnnnnnnnnnnnnnnnnnnnnnnnnnnnnnnnnnnnnnnnnnnnnnnnnnnnnnnnnnnnnnnnnnnnnnnnnnnnnnnnnnnnnnnnnnnnnnnnnnnnnnnnnnnnnnnnnnnnnnnnnnnnnnnnnnnnnnnnnnnnnnnnnnnnnnnnnnnnnnnnnnnnnnnnnnnnnnnnnnnnnnnnnnnnnnnnnnnnnnnnnnnnnnnnnnnnnnnnnnnnnnnnnnnnnnnnnnnnnnnnnnnnnnnnnnnnnnnnnnnnnnnnnnnnnnnnnnnnnnnnnnnnnnnnnnnnnnnnnnnnnnnnnnnnnnnnnnnnnnnnnnnnnnnnnnnnnnnnnnnnnnnnnnnnnnnnnnnnnnnnnnnnnnnnnnnnnnnnnnnnnnnnnnnnnnnnnnnnnnnnnnnnnnnnnnnnnnnnnnnnnnnnnnnnnnnnnnnnnnnnnnnnnnnnnnnnnnnnnnnnnnnnnnnnnnnnnnnnnnnnnnnnnnnnnnnnnnnnnnnnnnnnnnnnnnnnnnnnnnnnnnnnnnnnnnnnnnnnnnnnnnnnnnnnnnnnnnnnnnnnnnnnnnnnnnnnnnnnnnnnnnnnnnnnnnnnnnnnnnnnnnnnnnnnnnnnnnnnnnnnnnnnnnnnnnnnnnnnnnnnnnnnnnnnnnnnnnnnnnnnnnnnnnnnnnnnnnnnnnnnnnnnnnnnnnnnnnnnnnnnnnnnnnnnnnnnnnnnnnnnnnnnnnnnnnnnnnnnnnnnnnnnnnnnnnnnnnnnnnnnnnnnnnnnnnnnnnnnnnnnnnnnnnnnnnnnnnnnnnnnnnnnnnnnnnnnnnnnnnnnnnnnnnnnnnnnnnnnnnnnnnnnnnnnnnnnnnnnnnnnnnnnnnnnnnnnnnnnnnnnnnnnnnnnnnnnnnnnnnnnnnnnnnnnnnnnnnnnnnnnnnnnnnnnnnnnnnnnnnnnnnnnnnnnnnnnnnnnnnnnnnnnnnnnnnnnnnnnnnnnnnnnnnnnnnnnnnnnnnnnnnnnnnnnnnnnnnnnnnnnnnnnnnnnnnnnnnnnnnnnnnnnnnnnnnnnnnnnnnnnnnnnnnnnnnnnnnnnnnnnnnnnnnnnnnnnnnnnnnnnnnnnnnnnnnnnnnnnnnnnnnnnnnnnnnnnnnnnnnnnnnnnnnnnnnnnnnnnnnnnnnnnnnnnnnnnnnnnnnnnnnnnnnnnnnnnnnnnnnnnnnnnnnnnnnnnnnnnnnnnnnnnnnnnnnnnnnnnnnnnnnnnnnnnnnnnnnnnnnnnnnnnnnnnnnnnnnnnnnnnnnnnnnnnnnnnnnnnnnnnnnnnnnnnnnnnnnnnnnnnnnnnnnnnnnnnnnnnnnnnnnnnnnnnnnnnnnnnnnnnnnnnnnnnnnnnnnnnnnnnnnnnnnnnnnnnnnnnnnnnnnnnnnnnnnnnnnnnnnnnnnnnnnnnnnnnnnnnnnnnnnnnnnnnnnnnnnnnnnnnnnnnnnnnnnnnnnnnnnnnnnnnnnnnnnnnnnnnnnnnnnnnnnnnnnnnnnnnnnnnnnnnnnnnnnnnnnnnnnnnnnnnnnnnnnnnnnnnnnnnnnnnnnnnnnnnnnnnnnnnnnnnnnnnnnnnnnnnnnnnnnnnnnnnnnnnnnnnnnnnnnnnnnnnnnnnnnnnnnnnnnnnnnnnnnnnnnnnnnnnnnnnnnnnnnnnnnnnnnnnnnnnnnnnnnnnnnnnnnnnnnnnnnnnnnnnnnnnnnnnnnnnnnnnnnnnnnnnnnnnnnnnnnnnnnnnnnnnnnnnnnnnnnnnnnnnnnnnnnnnnnnnnnnnnnnnnnnnnnnnnnnnnnnnnnnnnnnnnnnnnnnnnnnnnnnnnnnnnnnnnnnnnnnnnnnnnnnnnnnnnnnnnnnnnnnnnnnnnnnnnnnnnnnnnnnnnnnnnnnnnnnnnnnnnnnnnnnnnnnnnnnnnnnnnnnnnnnnnnnnnnnnnnnnnnnnnnnnnnnnnnnnnnnnnnnnnnnnnnnnnnnnnnnnnnnnnnnnnnnnnnnnnnnnnnnnnnnnnnnnnnnnnnnnnnnnnnnnnnnnnnnnnnnnnnnnnnnnnnnnnnnnnnnnnnnnnnnnnnnnnnnnnnnnnnnnnnnnnnnnnnnnnnnnnnnnnnnnnnnnnnnnnnnnnnnnnnnnnnnnnnnnnnnnnnnnnnnnnnnnnnnnnnnnnnnnnnnnnnnnnnnnnnnnnnnnnnnnnnnnnnnnnnnnnnnnnnnnnnnnnnnnnnnnnnnnnnnnnnnnnnnnnnnnnnnnnnnnnnnnnnnnnnnnnnnnnnnnnnnnnnnnnnnnnnnnnnnnnnnnnnnnnnnnnnnnnnnnnnnnnnnnnnnnnnnnnnnnnnnnnnnnnnnnnnnnnnnnnnnnnnnnnnnnnnnnnnnnnnnnnnnnnnnnnnnnnnnnnnnnnnnnnnnnnnnnnnnnnnnnnnnnnnnnnnnnnnnnnnnnnnnnnnnnnnnnnnnnnnnnnnnnnnnnnnnnnnnnnnnnnnnnnnnnnnnnnnnnnnnnnnnnnnnnnnnnnnnnnnnnnnnnnnnnnnnnnnnnnnnnnnnnnnnnnnnnnnnnnnnnnnnnnnnnnnnnnnnnnnnnnnnnnnnnnnnnnnnnnnnnnnnnnnnnnnnnnnnnnnnnnnnnnnnnnnnnnnnnnnnnnnnnnnnnnnnnnnnnnnnnnnnnnnnnnnnnnnnnnnnnnnnnnnnnnnnnnnnnnnnnnnnnnnnnnnnnnnnnnnnnnnnnnnnnnnnnnnnnnnnnnnnnnnnnnnnnnnnnnnnnnnnnnnnnnnnnnnnnnnnnnnnnnnnnnnnnnnnnnnnnnnnnnnnnnnnnnnnnnnnnnnnnnnnnnnnnnnnnnnnnnnnnnnnnnnnnnnnnnnnnnnnnnnnnnnnnnnnnnnnnnnnnnnnnnnnnnnnnnnnnnnnnnnnnnnnnnnnnnnnnnnnnnnnnnnnnnnnnnnnnnnnnnnnnnnnnnnnnnnnnnnnnnnnnnnnnnnnnnnnnnnnnnnnnnnnnnnnnnnnnnnnnnnnnnnnnnnnnnnnnnnnnnnnnnnnnnnnnnnnnnnnnnnnnnnnnnnnnnnnnnnnnnnnnnnnnnnnnnnnnnnnnnnnnnnnnnnnnnnnnnnnnnnnnnnnnnnnnnnnnnnnnnnnnnnnnnnnnnnnnnnnnnnnnnnnnnnnnnnnnnnnnnnnnnnnnnnnnnnnnnnnnnnnnnnnnnnnnnnnnnnnnnnnnnnnnnnnnnnnnnnnnnnnnnnnnnnnnnnnnnnnnnnnnnnnnnnnnnnnnnnnnnnnnnnnnnnnnnnnnnnnnnnnnnnnnnnnnnnnnnnnnnnnnnnnnnnnnnnnnnnnnnnnnnnnnnnnnnnnnnnnnnnnnnnnnnnnnnnnnnnnnnnnnnnnnnnnnnnnnnnnnnnnnnnnnnnnnnnnnnnnnnnnnnnnnnnnnnnnnnnnnnnnnnnnnnnnnnnnnnnnnnnnnnnnnnnnnnnnnnnnnnnnnnnnnnnnnnnnnnnnnnnnnnnnnnnnnnnnnnnnnnnnnnnnnnnnnnnnnnnnnnnnnnnnnnnnnnnnnnnnnnnnnnnnnnnnnnnnnnnnnnnnnnnnnnnnnnnnnnnnnnnnnnnnnnnnnnnnnnnnnnnnnnnnnnnnnnnnnnnnnnnnnnnnnnnnnnnnnnnnnnnnnnnnnnnnnnnnnnnnnnnnnnnnnnnnnnnnnnnnnnnnnnnnnnnnnnnnnnnnnnnnnnnnnnnnnnnnnnnnnnnnnnnnnnnnnnnnnnnnnnnnnnnnnnnnnnnnnnnnnnnnnnnnnnnnnnnnnnnnnnnnnnnnnnnnnnnnnnnnnnnnnnnnnnnnnnnnnnnnnnnnnnnnnnnnnnnnnnnnnnnnnnnnnnnnnnnnnnnnnnnnnnnnnnnnnnnnnnnnnnnnnnnnnnnnnnnnnnnnnnnnnnnnnnnnnnnnnnnnnnnnnnnnnnnnnnnnnnnnnnnnnnnnnnnnnnnnnnnnnnnnnnnnnnnnnnnnnnnnnnnnnnnnnnnnnnnnnnnnnnnnnnnnnnnnnnnnnnnnnnnnnnnnnnnnnnnnnnnnnnnnnnnnnnnnnnnnnnnnnnnnnnnnnnnnnnnnnnnnnnnnnnnnnnnnnnnnnnnnnnnnnnnnnnnnnnnnnnnnnnnnnnnnnnnnnnnnnnnnnnnnnnnnnnnnnnnnnnnnnnnnnnnnnnnnnnnnnnnnnnnnnnnnnnnnnnnnnnnnnnnnnnnnnnnnnnnnnnnnnnnnnnnnnnnnnnnnnnnnnnnnnnnnnnnnnnnnnnnnnnnnnnnnnnnnnnnnnnnnnnnnnnnnnnnnnnnnnnnnnnnnnnnnnnnnnnnnnnnnnnnnnnnnnnnnnnnnnnnnnnnnnnnnnnnnnnnnnnnnnnnnnnnnnnnnnnnnnnnnnnnnnnnnnnnnnnnnnnnnnnnnnnnnnnnnnnnnnnnnnnnnnnnnnnnnnnnnnnnnnnnnnnnnnnnnnnnnnnnnnnnnnnnnnnnnnnnnnnnnnnnnnnnnnnnnnnnnnnnnnnnnnnnnnnnnnnnnnnnnnnnnnnnnnnnnnnnnnnnnnnnnnnnnnnnnnnnnnnnnnnnnnnnnnnnnnnnnnnnnnnnnnnnnnnnnnnnnnnnnnnnnnnnnnnnnnnnnnnnnnnnnnnnnnnnnnnnnnnnnnnnnnnnnnnnnnnnnnnnnnnnnnnnnnnnnnnnnnnnnnnnnnnnnnnnnnnnnnnnnnnnnnnnnnnnnnnnnnnnnnnnnnnnnnnnnnnnnnnnnnnnnnnnnnnnnnnnnnnnnnnnnnnnnnnnnnnnnnnnnnnnnnnnnnnnnnnnnnnnnnnnnnnnnnnnnnnnnnnnnnnnnnnnnnnnnnnnnnnnnnnnnnnnnnnnnnnnnnnnnnnnnnnnnnnnnnnnnnnnnnnnnnnnnnnnnnnnnnnnnnnnnnnnnnnnnnnnnnnnnnnnnnnnnnnnnnnnnnnnnnnnnnnnnnnnnnnnnnnnnnnnnnnnnnnnnnnnnnnnnnnnnnnnnnnnnnnnnnnnnnnnnnnnnnnnnnnnnnnnnnnnnnnnnnnnnnnnnnnnnnnnnnnnnnnnnnnnnnnnnnnnnnnnnnnnnnnnnnnnnnnnnnnnnnnnnnnnnnnnnnnnnnnnnnnnnnnnnnnnnnnnnnnnnnnnnnnnnnnnnnnnnnnnnnnnnnnnnnnnnnnnnnnnnnnnnnnnnnnnnnnnnnnnnnnnnnnnnnnnnnnnnnnnnnnnnnnnnnnnnnnnnnnnnnnnnnnnnnnnnnnnnnnnnnnnnnnnnnnnnnnnnnnnnnnnnnnnnnnnnnnnnnnnnnnnnnnnnnnnnnnnnnnnnnnnnnnnnnnnnnnnnnnnnnnnnnnnnnnnnnnnnnnnnnnnnnnnnnnnnnnnnnnnnnnnnnnnnnnnnnnnnnnnnnnnnnnnnnnnnnnnnnnnnnnnnnnnnnnnnnnnnnnnnnnnnnnnnnnnnnnnnnnnnnnnnnnnnnnnnnnnnnnnnnnnnnnnnnnnnnnnnnnnnnnnnnnnnnnnnnnnnnnnnnnnnnnnnnnnnnnnnnnnnnnnnnnnnnnnnnnnnnnnnnnnnnnnnnnnnnnnnnnnnnnnnnnnnnnnnnnnnnnnnnnnnnnnnnnnnnnnnnnnnnnnnnnnnnnnnnnnnnnnnnnnnnnnnnnnnnnnnnnnnnnnnnnnnnnnnnnnnnnnnnnnnnnnnnnnnnnnnnnnnnnnnnnnnnnnnnnnnnnnnnnnnnnnnnnnnnnnnnnnnnnnnnnnnnnnnnnnnnnnnnnnnnnnnnnnnnnnnnnnnnnnnnnnnnnnnnnnnnnnnnnnnnnnnnnnnnnnnnnnnnnnnnnnnnnnnnnnnnnnnnnnnnnnnnnnnnnnnnnnnnnnnnnnnnnnnnnnnnnnnnnnnnnnnnnnnnnnnnnnnnnnnnnnnnnnnnnnnnnnnnnnnnnnnnnnnnnnnnnnnnnnnnnnnnnnnnnnnnnnnnnnnnnnnnnnnnnnnnnnnnnnnnnnnnnnnnnnnnnnnnnnnnnnnnnnnnnnnnnnnnnnnnnnnnnnnnnnnnnnnnnnnnnnnnnnnnnnnnnnnnnnnnnnnnnnnnnnnnnnnnnnnnnnnnnnnnnnnnnnnnnnnnnnnnnnnnnnnnnnnnnnnnnnnnnnnnnnnnnnnnnnnnnnnnnnnnnnnnnnnnnnnnnnnnnnnnnnnnnnnnnnnnnnnnnnnnnnnnnnnnnnnnnnnnnnnnnnnnnnnnnnnnnnnnnnnnnnnnnnnnnnnnnnnnnnnnnnnnnnnnnnnnnnnnnnnnnnnnnnnnnnnnnnnnnnnnnnnnnnnnnnnnnnnnnnnnnnnnnnnnnnnnnnnnnnnnnnnnnnnnnnnnnnnnnnnnnnnnnnnnnnnnnnnnnnnnnnnnnnnnnnnnnnnnnnnnnnnnnnnnnnnnnnnnnnnnnnnnnnnnnnnnnnnnnnnnnnnnnnnnnnnnnnnnnnnnnnnnnnnnnnnnnnnnnnnnnnnnnnnnnnnnnnnnnnnnnnnnnnnnnnnnnnnnnnnnnnnnnnnnnnnnnnnnnnnnnnnnnnnnnnnnnnnnnnnnnnnnnnnnnnnnnnnnnnnnnnnnnnnnnnnnnnnnnnnnnnnnnnnnnnnnnnnnnnnnnnnnnnnnnnnnnnnnnnnnnnnnnnnnnnnnnnnnnnnnnnnnnnnnnnnnnnnnnnnnnnnnnnnnnnnnnnnnnnnnnnnnnnnnnnnnnnnnnnnnnnnnnnnnnnnnnnnnnnnnnnnnnnnnnnnnnnnnnnnnnnnnnnnnnnnnnnnnnnnnnnnnnnnnnnnnnnnnnnnnnnnnnnnnnnnnnnnnnnnnnnnnnnnnnnnnnnnnnnnnnnnnnnnnnnnnnnnnnnnnnnnnnnnnnnnnnnnnnnnnnnnnnnnnnnnnnnnnnnnnnnnnnnnnnnnnnnnnnnnnnnnnnnnnnnnnnnnnnnnnnnnnnnnnnnnnnnnnnnnnnnnnnnnnnnnnnnnnnnnnnnnnnnnnnnnnnnnnnnnnnnnnnnnnnnnnnnnnnnnnnnnnnnnnnnnnnnnnnnnnnnnnnnnnnnnnnnnnnnnnnnnnnnnnnnnnnnnnnnnnnnnnnnnnnnnnnnnnnnnnnnnnnnnnnnnnnnnnnnnnnnnnnnnnnnngccggaaggtccgtaaatggggcgcgcgccggacgggtgcgtgtctcgccccaggcggttgtggcatgatgcgcggcgggaaacgcgcataggcttgaaacccgagaagagggaggttcgcggccatgtttgatttgcttgcgctttttgttctgggtgcgccggattccggcgggctggttgccggtgaagtggaggtggtggcggaggggtttcagtttacggaggggccggtctggctgccgtccgaggggttgatcttcagcgacattccggcggacacgatctaccgcgcggacaagtcggtgttccgccagcccagcgggcagtcgaacgggttgatcgtggacgcgcggggccggctgatcgcgtgtgagcaccggaaccggcgtgtgacgcgaacagaaaaggatggaacggttactgtgttggcggaccgtttcgaggggaagcggttcaacagcccgaatgacgcggtggccgccgcggacggcgcggtgtatttcacggacccgccgtatgggctggagggcgggcttaaggggccgaacgcggaattggacttctgcggcgtgttccgggtggacgcctcgggcgaggtgcgggcgctcgcgcgggatttcaagaagccgaacggcatcgcgctgtcgccggacgggaagacgctctacgtcgcggatacggaagggggccacgttcgcgcgtttgacgtggcggaggacggatcgctgcggaatgaccgggtgttcttcaaggtgttctcgccggacggcatggccgtggacgcgcgcgggaacgtctggaccacgggcgggaaggcggtcaccgtcgtcagcccggagggcgaacaattggagcaaatcgagttcccccacatcccggcgaattgcgccttcggcgacgcggacggtatgacgctgtatgtgaccgcgcgcacgacggtctacaaggtgcggacgggggttggggggaagtgggaagtgggaagtgagaagtgggaagcgggaagcgggaagcgggaagtgggcggcatgtccacacatgttgcacacaacttccacctacgttggacagtagcgcgcggaccctcttgacaggatgcatctaaccgtagtactgttgcggtaatcgattcgatggagaggggggcgattatgcccgcactggaaggaccgccaggcttcgttggcgcgccgcgcgccacgggtgcgaggctccatgtcaccgccgcgcaagccgcgccacgatacccgcaaactgtcccgtaactcggaggccgccatgaactacaacctcttgaaggaagactggattccagtcctctacgcgaacggagaatggaagcgggtcgggattctcaaggcattcgagcatgcgcaccgaatccgacaaatcgccgcgactaatccgatggaccgagtagccatccttcgtttcctgcttgctatcctgtactggtgcaagggaagtccacctgaaactacgaacgcggacttgcccaagtcgtttccagcagagtggtttgccaaactcgaagagaatcgagaatgcttcaatctcctgggcgagggaagacggttctttcagattaggaaatgtggcgaggcagtacaaacgaagcttccgtcaaactacctcattcacgagattcccactggccggaatgcgtggcattttcgacactcaagggatggagcaaacggattgtgccttgcttgctgtgcggtcgggctcttgcggctgccgttgtttgcgacatctggtggccgcggcaagccaccgggcatcaacgctaaaccaccactctatgcagttcccgtggggccttcgctggccacgacattgtggctttcatggtgtgagcaaccaaacttggggacacctgcgtgggagtccgtaaacgtagagcttccaccaacgggcgccgtcccgacactggtcgggctgacatggctgccgcgacgagtatggttggatgatcccgaaaattgttctgaccaatgcatttcctgtggtcgggaggaaacgcttgttcgaagatgtgtatttgctggagtcggcagcacgaagacaggcgacggtgaatcgagtcggctgtggagcgatccgcacgttatttacgttcgcgattccaaaggtaacgtcacatcgatgcatgcgagtgatgccttgggcgctcctgatgccgcagcggggcaatgggcaagaattgccgcaagtatggttgcacagcgggagaacggggatatcacaagccttgggtgggcagacgcaatcgaaggaactcgggcgcacgtatggctggtgggtttctcaactgtgcaaaacgacaaatacttggaggcaatggaagccgttgttgatctgcctttcgacgttcaggagttgtcagaggtcatcgcgcgattcacgcggtggcaagcgcaaggacgcagtctagaggcgcgtatccaagccatcgagcggcccgagaaaagaggcaagtccgagaagagagcagtgagcgtcgttgcggcgatacgtccacatgtcgaggggcttgtatcgggcctcacggaccaacttgttgtcggtggcgacgagaagtggcaggaagcagccgaaacgtaccggccaatgatgagcgctgtatccaagtcattgtcgccggggtttactgtgcaagccgtgcaacggcgacggcaaatgggcgcgctgatgccggatgtgtggcgtgcaacgaaagtcacgaaagaagagagacgaaagaagggaggtgcgcgatgagtcctacggagcaatatatcgaggcactaagcaacttgaagtccggggatttgggcctgctccggacacatgccggacaagggctagatcaatcagtagagggatttgacctcttcgccgggctatggtggccgttgcgggacaagaatcaccgcgcgccgcgccgacaggtggcttggcttatagcgaaactctacgcatgctgtccaatcgagcacgctgacggccaagtactcgggcgtcaacttcgccagtgttggcttcacgttccggcagataagcgcgagcgattccgggcgcttgttgaccaactccttgtctcaagccttgcggagattgagcctgcgatacgttgggcgttgatggaaatcagcgacagggaacttaaacttgattgggtcaagttgaccgatgacctttccatttgggaacgagagagtacccgccttcggtgggcggaacagtttattgctaacaacggagggttgaaagatgttgattgacatgcatgtgattcagaaccacagtcccgcgaatctcaatcgggacgacttgggcgcgccgaagacgtgctactttggcggagtacttcgctctcgaatttccagtcagtgtattaaacgaagtattcgcatgagtgagcagtttagggtgctttgtggtggagtgagaacgcgccaactggcaaagttgatcactgatcggatagaaggcgggccagaggttcagaagcgcgccgagaagattctggagatttgcggtctcaagccgaagaaatcgaagaaggaggaatctgagcagagtggttcagaacggagcaagatgctggtctatacaagtcgcgacgcgattgaagaaatggcccggctacttcaagccagcactggcaagagcgatgacaagttggccgaggaattcggcaaactaattgccacgcggaccgcggttccagatatggcgctcagtgggcggatgctggagacaggcgtgcttaaagataccaccgttgaagccgctttgcaggtagcgcatgccattttcacccacgaggcgcggccggaagtggattactacgttgccgccgacgatatcccaggggacgacgcgggagccggctatgtggacgaggccatgtttgcctcggcttgcttctacaagtacttctctatccactgggagatgctggtcgagaatcttcaaggctacttggagttggccgcacatacggtcggggcattcattcggggtgctgcgctgaccaacccgacgggaaagcagaacagttttgccgcgcacaatccaccggatggcatgcttatcgagttcaaggacacgccaatcagttacgcgaatgcgtttgcgaaaccggtgtctctcgacggggggcgggacatgatctcgcagagcattgcgcaattgagccagtatgcctacgacctggaagcgggttatggtccgcctcgggaacgtttctggttctcgcctaatgagaggtattccctgaatgttgagaaggacacggagcgttcccttactccaaacagctacaagtctttggatgccttgatcgaggcggtgattaagggtattgacccgaagttggactggcaacaagtgcagcaagccgtagtctgttccgaggtggccccatgagtggaaacacgctctttctacggctcgaaggccctatgcaggcatggggcaatcaggagtcgaagtttgttattcgccgcacgacggacgcaccaacgaagtccggggtgctcggcctattatgcgccgcgatgggtgtgcctagagtcgaagcgtcacgcgagcggctgccgcgactggtggcactgcaaatggccgtgcgttgcgacaggccgggcatacactggtgggattaccacaccgtcggcgccggaatgcgcatgagaacggcggagggcgggatgaaggcggacaccatgctgaccaggcgcgaatacttgtgtgacgccagtttccttgttgtccttcagggcgatccgccggtgatcgaggagttggccggcgccttgcggaatccggtatggccgctgtacttggggagaaaatgctgccccgtctcgcgaccagtggcagaggcggagtcagtgacgtgctccgatctcttgtcggccctagcgttccttccgtggcggccgcgatatgaaggtgacgaagtccctgaatccgtggattgtctgttcgattgggtgccgactgcccaggaaagcgaagcaccgccggagacggaagtctggtatgacgtaccgatttcgtttgaaccgccaagccatcgaccaaggtttgtttctcgaaggcaattgcagttgggcagggacggtcaagtggagaccggagagccaacccaacgcaggactccgcgcccgccgcggccacgcgccaattacgggaatacacagtaccggcgggttcgccaagagcgattagatcgtgacaagcatctctgtgtcttctgcaagtcttccgcgacgactgtacagcatgtcacttatcggcacgctggcggcgacgaacaaattgaggaacttcgttcactctgtcgcctgtgccatgacgccgtgacaatgatcgaatatggcctcgggatgggactggacagaatcaatcccgaggaacagcgatggcgagacacgattattcgtaagcgggacgagatcatacgctttcggtccctggagacgcggcgaaggagactggcggcagaggaggtcgaataatgtacctgtcgcacctcttgatcaatgttggcgacaatccggaccggccgcggccggggcggctgtggctgcgaaatgtttaccatgtgcaccagcggctttggatggcgtttcccaccgaggcgcaacgcacggccgatccggagttccttgcccccttcaatccgaagggcttcgcggccccgcgcttcctctttcgtgtggacaatagcgtcgagcgcaattgtccccgcgcagtaatcgtggtcctgtcggggtcggaaccgaattggcgctatgcctttcagaatgcgcgcacgttccttgccgccgaagcggaaacgcgcgaatatagtccaacgtttgcgacggggcaggagttctgcttccgcattcgcgtcaacttgagcaagaaaagcgtgaagtatcgcaagacaggggagaagacggacacagaaggacgcccgcgaacacagggcaagcgtattgcgctgacgtgggagaaggaccagcggcctgacgaggtcatcgttccctggtttgcgagaaaggggccacggaacggcttcgaactgcggaaatgcgaagtgattcaaatcggttgggtaaacgcgtttcggcccggcaaaggcgagcggatgaagttccggtccgcgcttctcgaaggcattttcgcggtaaaggacgagaaagcgcttgccgatgctattgccgccggcatcggttcggcgaaggcgtttggttttggtttgctttcggttgcgccgcgctgattggcgcggcgttgcagcgcgggttctttgacagttgaatcgtgtgagagcggcgtgaggatgttgcctacggtgttgaagacacgggcgggacgcccgtgccacgaacttgggaaaagggggaagccatgagaacaaaggactatcacgaaatcccgaaggtgcgcgataagtggagttacctgtacgtcgagcactgccgggtggatcaggaagaaaaagcgattgcggtgcatgatcagtacggggtgacgccggtaccgtgcgcgaatttgacgttgttgatgctgggtcccggcacgaagatcacgcatgcggccattacaacgctggcggacacgggctgtatggttgtctggtgcggggaacagggggtgcgcttctatgcggcgggtacgggcacgacgcgcaacgcggataagctgctgcatcaggcgagtctgtgcacgcaccgtcagagtcgcttgcacgtggtgcggcgcatgtacgagatgcgcttcgagcaggatgtcgatccgaacctgacgctgcaacagattcgcgggatggaaggtgtgcgggtgcgggaggcgtatgcccgcgcttcgctcgaaagcggcgtgccctggcgcgggcggtcgtatgaccgcggccaatgggcgaaggcggacccggtgaatcgggcgctatccgcggcaaactcgtgcctgtacggtgtctcccatgcggcgattgtggcggcggggtattccacggcgctcgggttcatccacacgggaaagcaattgtcgtttgtctacgacatcgcggacctctacaaggtggacgtcaccgtgcccgcggcttttcaggccgccgcgtcggtcgagaagaacgtcgagcgcgaggtgcgcctgcggtgtcgtgatacgttcgcgcagaagaatcttctgccgcgtatcgtggatgatatcgattacgtgctggcgtttgcgccgccggaagaagaacccacgggggatttcgacagcgacccggccagacccggggacctgtgggacccggaaaggggcgtgacgccgggcggggtgcagtatggcggtgagccgcccacgcaggaggaactgccgttatgatggtgatgatcctcgaacgcgtgcctgcttcgttgcggggcgaactcagccgatggatgttcgagccgcataccggcgtcttcgtcggtacggtgtccgccatggtccgcgaaagactgtggcagaaggcgtgtgggagcgtgaaagacggcgcctgcatgctgatttggagttccaatacggaacagggcttcaagatcgacttctggggcggcacgaagcgccatgtgactgactgggagggacttcaactggtaacaaagccacgagagccttaaaatgcaatgtgtgttccccacgcacgtggggatgaaccgaatgattgacaccatcgccttcgaagtcccaagtgttccccacgcacgtggggatgaaccgaataggacgcgccttgcggacgaggcatgggagtgttccccacgcacgtggggatgaaccgtaccttttccctatactacctgtactacacgcgtgttccccacgcacgtggggatgaaccgctccgcgaccgtcgcctggcgtatgaactcgggtgttccccacgcacgtggggatgaaccggcggacgccaagcctcttctctcgcgttgcacgtgttccccacgcacgtggggatgaaccgcgggggacaaagccaccgagggcgcgcgcaaagtgttccccacgcacgtggggatgaaccgaatcgcggttctcgtggacgccacaaaatccagtgttccccacgcacgtggggatgaaccggacatggacccgcgagtagcaaagttagccgcgtgttccccacgcacgtggggatgaaccggagagcaatgacgtggcaagagcgcatagaacgtgttccccacgcacgtggggatgaaccttcagacgcgcccgcatccgcctcgggctgaacgtgttccccacgcacgtggggatgaaccgcgagttgcaggaacgttccattacattcgctcgtgttccccacgcacgtggggatgaaccgacgccggacacaaccaaactgatacggcctgtgtgttccccacgcacgtggggatgaaccgtagcacgcccgacttccctacgcacctataacgtgttccccacgcacgtggggatgaaccgggcgaaggacaccggcgagacatgggtcgcgcgtgttccccacgcacgtggggatgaaccgacgagtgcggggtcgccctccagggccggggggtgttccccacgcacgtggggatgaaccggaagaggaacaagaagaagagcagcaagaagagtgttccccacgcacgtggggatgaaccgagctagagataggcgttgtggatgatgaaattgtgttccccacgcacgtggggatgaaccggtc

SEQ ID NO: 1075 - DNA, 104514 bp, Artificial Sequence
  Synthetic Oligonucleotide
  misc_feature (1)..(95919): n is a, c, g, or t
nnnnnnnnnnnnnnnnnnnnnnnnnnnnnnnnnnnnnnnnnnnnnnnnnnnnnnnnnnnnnnnnnnnnnnnnnnnnnnnnnnnnnnnnnnnnnnnnnnnnnnnnnnnnnnnnnnnnnnnnnnnnnnnnnnnnnnnnnnnnnnnnnnnnnnnnnnnnnnnnnnnnnnnnnnnnnnnnnnnnnnnnnnnnnnnnnnnnnnnnnnnnnnnnnnnnnnnnnnnnnnnnnnnnnnnnnnnnnnnnnnnnnnnnnnnnnnnnnnnnnnnnnnnnnnnnnnnnnnnnnnnnnnnnnnnnnnnnnnnnnnnnnnnnnnnnnnnnnnnnnnnnnnnnnnnnnnnnnnnnnnnnnnnnnnnnnnnnnnnnnnnnnnnnnnnnnnnnnnnnnnnnnnnnnnnnnnnnnnnnnnnnnnnnnnnnnnnnnnnnnnnnnnnnnnnnnnnnnnnnnnnnnnnnnnnnnnnnnnnnnnnnnnnnnnnnnnnnnnnnnnnnnnnnnnnnnnnnnnnnnnnnnnnnnnnnnnnnnnnnnnnnnnnnnnnnnnnnnnnnnnnnnnnnnnnnnnnnnnnnnnnnnnnnnnnnnnnnnnnnnnnnnnnnnnnnnnnnnnnnnnnnnnnnnnnnnnnnnnnnnnnnnnnnnnnnnnnnnnnnnnnnnnnnnnnnnnnnnnnnnnnnnnnnnnnnnnnnnnnnnnnnnnnnnnnnnnnnnnnnnnnnnnnnnnnnnnnnnnnnnnnnnnnnnnnnnnnnnnnnnnnnnnnnnnnnnnnnnnnnnnnnnnnnnnnnnnnnnnnnnnnnnnnnnnnnnnnnnnnnnnnnnnnnnnnnnnnnnnnnnnnnnnnnnnnnnnnnnnnnnnnnnnnnnnnnnnnnnnnnnnnnnnnnnnnnnnnnnnnnnnnnnnnnnnnnnnnnnnnnnnnnnnnnnnnnnnnnnnnnnnnnnnnnnnnnnnnnnnnnnnnnnnnnnnnnnnnnnnnnnnnnnnnnnnnnnnnnnnnnnnnnnnnnnnnnnnnnnnnnnnnnnnnnnnnnnnnnnnnnnnnnnnnnnnnnnnnnnnnnnnnnnnnnnnnnnnnnnnnnnnnnnnnnnnnnnnnnnnnnnnnnnnnnnnnnnnnnnnnnnnnnnnnnnnnnnnnnnnnnnnnnnnnnnnnnnnnnnnnnnnnnnnnnnnnnnnnnnnnnnnnnnnnnnnnnnnnnnnnnnnnnnnnnnnnnnnnnnnnnnnnnnnnnnnnnnnnnnnnnnnnnnnnnnnnnnnnnnnnnnnnnnnnnnnnnnnnnnnnnnnnnnnnnnnnnnnnnnnnnnnnnnnnnnnnnnnnnnnnnnnnnnnnnnnnnnnnnnnnnnnnnnnnnnnnnnnnnnnnnnnnnnnnnnnnnnnnnnnnnnnnnnnnnnnnnnnnnnnnnnnnnnnnnnnnnnnnnnnnnnnnnnnnnnnnnnnnnnnnnnnnnnnnnnnnnnnnnnnnnnnnnnnnnnnnnnnnnnnnnnnnnnnnnnnnnnnnnnnnnnnnnnnnnnnnnnnnnnnnnnnnnnnnnnnnnnnnnnnnnnnnnnnnnnnnnnnnnnnnnnnnnnnnnnnnnnnnnnnnnnnnnnnnnnnnnnnnnnnnnnnnnnnnnnnnnnnnnnnnnnnnnnnnnnnnnnnnnnnnnnnnnnnnnnnnnnnnnnnnnnnnnnnnnnnnnnnnnnnnnnnnnnnnnnnnnnnnnnnnnnnnnnnnnnnnnnnnnnnnnnnnnnnnnnnnnnnnnnnnnnnnnnnnnnnnnnnnnnnnnnnnnnnnnnnnnnnnnnnnnnnnnnnnnnnnnnnnnnnnnnnnnnnnnnnnnnnnnnnnnnnnnnnnnnnnnnnnnnnnnnnnnnnnnnnnnnnnnnnnnnnnnnnnnnnnnnnnnnnnnnnnnnnnnnnnnnnnnnnnnnnnnnnnnnnnnnnnnnnnnnnnnnnnnnnnnnnnnnnnnnnnnnnnnnnnnnnnnnnnnnnnnnnnnnnnnnnnnnnnnnnnnnnnnnnnnnnnnnnnnnnnnnnnnnnnnnnnnnnnnnnnnnnnnnnnnnnnnnnnnnnnnnnnnnnnnnnnnnnnnnnnnnnnnnnnnnnnnnnnnnnnnnnnnnnnnnnnnnnnnnnnnnnnnnnnnnnnnnnnnnnnnnnnnnnnnnnnnnnnnnnnnnnnnnnnnnnnnnnnnnnnnnnnnnnnnnnnnnnnnnnnnnnnnnnnnnnnnnnnnnnnnnnnnnnnnnnnnnnnnnnnnnnnnnnnnnnnnnnnnnnnnnnnnnnnnnnnnnnnnnnnnnnnnnnnnnnnnnnnnnnnnnnnnnnnnnnnnnnnnnnnnnnnnnnnnnnnnnnnnnnnnnnnnnnnnnnnnnnnnnnnnnnnnnnnnnnnnnnnnnnnnnnnnnnnnnnnnnnnnnnnnnnnnnnnnnnnnnnnnnnnnnnnnnnnnnnnnnnnnnnnnnnnnnnnnnnnnnnnnnnnnnnnnnnnnnnnnnnnnnnnnnnnnnnnnnnnnnnnnnnnnnnnnnnnnnnnnnnnnnnnnnnnnnnnnnnnnnnnnnnnnnnnnnnnnnnnnnnnnnnnnnnnnnnnnnnnnnnnnnnnnnnnnnnnnnnnnnnnnnnnnnnnnnnnnnnnnnnnnnnnnnnnnnnnnnnnnnnnnnnnnnnnnnnnnnnnnnnnnnnnnnnnnnnnnnnnnnnnnnnnnnnnnnnnnnnnnnnnnnnnnnnnnnnnnnnnnnnnnnnnnnnnnnnnnnnnnnnnnnnnnnnnnnnnnnnnnnnnnnnnnnnnnnnnnnnnnnnnnnnnnnnnnnnnnnnnnnnnnnnnnnnnnnnnnnnnnnnnnnnnnnnnnnnnnnnnnnnnnnnnnnnnnnnnnnnnnnnnnnnnnnnnnnnnnnnnnnnnnnnnnnnnnnnnnnnnnnnnnnnnnnnnnnnnnnnnnnnnnnnnnnnnnnnnnnnnnnnnnnnnnnnnnnnnnnnnnnnnnnnnnnnnnnnnnnnnnnnnnnnnnnnnnnnnnnnnnnnnnnnnnnnnnnnnnnnnnnnnnnnnnnnnnnnnnnnnnnnnnnnnnnnnnnnnnnnnnnnnnnnnnnnnnnnnnnnnnnnnnnnnnnnnnnnnnnnnnnnnnnnnnnnnnnnnnnnnnnnnnnnnnnnnnnnnnnnnnnnnnnnnnnnnnnnnnnnnnnnnnnnnnnnnnnnnnnnnnnnnnnnnnnnnnnnnnnnnnnnnnnnnnnnnnnnnnnnnnnnnnnnnnnnnnnnnnnnnnnnnnnnnnnnnnnnnnnnnnnnnnnnnnnnnnnnnnnnnnnnnnnnnnnnnnnnnnnnnnnnnnnnnnnnnnnnnnnnnnnnnnnnnnnnnnnnnnnnnnnnnnnnnnnnnnnnnnnnnnnnnnnnnnnnnnnnnnnnnnnnnnnnnnnnnnnnnnnnnnnnnnnnnnnnnnnnnnnnnnnnnnnnnnnnnnnnnnnnnnnnnnnnnnnnnnnnnnnnnnnnnnnnnnnnnnnnnnnnnnnnnnnnnnnnnnnnnnnnnnnnnnnnnnnnnnnnnnnnnnnnnnnnnnnnnnnnnnnnnnnnnnnnnnnnnnnnnnnnnnnnnnnnnnnnnnnnnnnnnnnnnnnnnnnnnnnnnnnnnnnnnnnnnnnnnnnnnnnnnnnnnnnnnnnnnnnnnnnnnnnnnnnnnnnnnnnnnnnnnnnnnnnnnnnnnnnnnnnnnnnnnnnnnnnnnnnnnnnnnnnnnnnnnnnnnnnnnnnnnnnnnnnnnnnnnnnnnnnnnnnnnnnnnnnnnnnnnnnnnnnnnnnnnnnnnnnnnnnnnnnnnnnnnnnnnnnnnnnnnnnnnnnnnnnnnnnnnnnnnnnnnnnnnnnnnnnnnnnnnnnnnnnnnnnnnnnnnnnnnnnnnnnnnnnnnnnnnnnnnnnnnnnnnnnnnnnnnnnnnnnnnnnnnnnnnnnnnnnnnnnnnnnnnnnnnnnnnnnnnnnnnnnnnnnnnnnnnnnnnnnnnnnnnnnnnnnnnnnnnnnnnnnnnnnnnnnnnnnnnnnnnnnnnnnnnnnnnnnnnnnnnnnnnnnnnnnnnnnnnnnnnnnnnnnnnnnnnnnnnnnnnnnnnnnnnnnnnnnnnnnnnnnnnnnnnnnnnnnnnnnnnnnnnnnnnnnnnnnnnnnnnnnnnnnnnnnnnnnnnnnnnnnnnnnnnnnnnnnnnnnnnnnnnnnnnnnnnnnnnnnnnnnnnnnnnnnnnnnnnnnnnnnnnnnnnnnnnnnnnnnnnnnnnnnnnnnnnnnnnnnnnnnnnnnnnnnnnnnnnnnnnnnnnnnnnnnnnnnnnnnnnnnnnnnnnnnnnnnnnnnnnnnnnnnnnnnnnnnnnnnnnnnnnnnnnnnnnnnnnnnnnnnnnnnnnnnnnnnnnnnnnnnnnnnnnnnnnnnnnnnnnnnnnnnnnnnnnnnnnnnnnnnnnnnnnnnnnnnnnnnnnnnnnnnnnnnnnnnnnnnnnnnnnnnnnnnnnnnnnnnnnnnnnnnnnnnnnnnnnnnnnnnnnnnnnnnnnnnnnnnnnnnnnnnnnnnnnnnnnnnnnnnnnnnnnnnnnnnnnnnnnnnnnnnnnnnnnnnnnnnnnnnnnnnnnnnnnnnnnnnnnnnnnnnnnnnnnnnnnnnnnnnnnnnnnnnnnnnnnnnnnnnnnnnnnnnnnnnnnnnnnnnnnnnnnnnnnnnnnnnnnnnnnnnnnnnnnnnnnnnnnnnnnnnnnnnnnnnnnnnnnnnnnnnnnnnnnnnnnnnnnnnnnnnnnnnnnnnnnnnnnnnnnnnnnnnnnnnnnnnnnnnnnnnnnnnnnnnnnnnnnnnnnnnnnnnnnnnnnnnnnnnnnnnnnnnnnnnnnnnnnnnnnnnnnnnnnnnnnnnnnnnnnnnnnnnnnnnnnnnnnnnnnnnnnnnnnnnnnnnnnnnnnnnnnnnnnnnnnnnnnnnnnnnnnnnnnnnnnnnnnnnnnnnnnnnnnnnnnnnnnnnnnnnnnnnnnnnnnnnnnnnnnnnnnnnnnnnnnnnnnnnnnnnnnnnnnnnnnnnnnnnnnnnnnnnnnnnnnnnnnnnnnnnnnnnnnnnnnnnnnnnnnnnnnnnnnnnnnnnnnnnnnnnnnnnnnnnnnnnnnnnnnnnnnnnnnnnnnnnnnnnnnnnnnnnnnnnnnnnnnnnnnnnnnnnnnnnnnnnnnnnnnnnnnnnnnnnnnnnnnnnnnnnnnnnnnnnnnnnnnnnnnnnnnnnnnnnnnnnnnnnnnnnnnnnnnnnnnnnnnnnnnnnnnnnnnnnnnnnnnnnnnnnnnnnnnnnnnnnnnnnnnnnnnnnnnnnnnnnnnnnnnnnnnnnnnnnnnnnnnnnnnnnnnnnnnnnnnnnnnnnnnnnnnnnnnnnnnnnnnnnnnnnnnnnnnnnnnnnnnnnnnnnnnnnnnnnnnnnnnnnnnnnnnnnnnnnnnnnnnnnnnnnnnnnnnnnnnnnnnnnnnnnnnnnnnnnnnnnnnnnnnnnnnnnnnnnnnnnnnnnnnnnnnnnnnnnnnnnnnnnnnnnnnnnnnnnnnnnnnnnnnnnnnnnnnnnnnnnnnnnnnnnnnnnnnnnnnnnnnnnnnnnnnnnnnnnnnnnnnnnnnnnnnnnnnnnnnnnnnnnnnnnnnnnnnnnnnnnnnnnnnnnnnnnnnnnnnnnnnnnnnnnnnnnnnnnnnnnnnnnnnnnnnnnnnnnnnnnnnnnnnnnnnnnnnnnnnnnnnnnnnnnnnnnnnnnnnnnnnnnnnnnnnnnnnnnnnnnnnnnnnnnnnnnnnnnnnnnnnnnnnnnnnnnnnnnnnnnnnnnnnnnnnnnnnnnnnnnnnnnnnnnnnnnnnnnnnnnnnnnnnnnnnnnnnnnnnnnnnnnnnnnnnnnnnnnnnnnnnnnnnnnnnnnnnnnnnnnnnnnnnnnnnnnnnnnnnnnnnnnnnnnnnnnnnnnnnnnnnnnnnnnnnnnnnnnnnnnnnnnnnnnnnnnnnnnnnnnnnnnnnnnnnnnnnnnnnnnnnnnnnnnnnnnnnnnnnnnnnnnnnnnnnnnnnnnnnnnnnnnnnnnnnnnnnnnnnnnnnnnnnnnnnnnnnnnnnnnnnnnnnnnnnnnnnnnnnnnnnnnnnnnnnnnnnnnnnnnnnnnnnnnnnnnnnnnnnnnnnnnnnnnnnnnnnnnnnnnnnnnnnnnnnnnnnnnnnnnnnnnnnnnnnnnnnnnnnnnnnnnnnnnnnnnnnnnnnnnnnnnnnnnnnnnnnnnnnnnnnnnnnnnnnnnnnnnnnnnnnnnnnnnnnnnnnnnnnnnnnnnnnnnnnnnnnnnnnnnnnnnnnnnnnnnnnnnnnnnnnnnnnnnnnnnnnnnnnnnnnnnnnnnnnnnnnnnnnnnnnnnnnnnnnnnnnnnnnnnnnnnnnnnnnnnnnnnnnnnnnnnnnnnnnnnnnnnnnnnnnnnnnnnnnnnnnnnnnnnnnnnnnnnnnnnnnnnnnnnnnnnnnnnnnnnnnnnnnnnnnnnnnnnnnnnnnnnnnnnnnnnnnnnnnnnnnnnnnnnnnnnnnnnnnnnnnnnnnnnnnnnnnnnnnnnnnnnnnnnnnnnnnnnnnnnnnnnnnnnnnnnnnnnnnnnnnnnnnnnnnnnnnnnnnnnnnnnnnnnnnnnnnnnnnnnnnnnnnnnnnnnnnnnnnnnnnnnnnnnnnnnnnnnnnnnnnnnnnnnnnnnnnnnnnnnnnnnnnnnnnnnnnnnnnnnnnnnnnnnnnnnnnnnnnnnnnnnnnnnnnnnnnnnnnnnnnnnnnnnnnnnnnnnnnnnnnnnnnnnnnnnnnnnnnnnnnnnnnnnnnnnnnnnnnnnnnnnnnnnnnnnnnnnnnnnnnnnnnnnnnnnnnnnnnnnnnnnnnnnnnnnnnnnnnnnnnnnnnnnnnnnnnnnnnnnnnnnnnnnnnnnnnnnnnnnnnnnnnnnnnnnnnnnnnnnnnnnnnnnnnnnnnnnnnnnnnnnnnnnnnnnnnnnnnnnnnnnnnnnnnnnnnnnnnnnnnnnnnnnnnnnnnnnnnnnnnnnnnnnnnnnnnnnnnnnnnnnnnnnnnnnnnnnnnnnnnnnnnnnnnnnnnnnnnnnnnnnnnnnnnnnnnnnnnnnnnnnnnnnnnnnnnnnnnnnnnnnnnnnnnnnnnnnnnnnnnnnnnnnnnnnnnnnnnnnnnnnnnnnnnnnnnnnnnnnnnnnnnnnnnnnnnnnnnnnnnnnnnnnnnnnnnnnnnnnnnnnnnnnnnnnnnnnnnnnnnnnnnnnnnnnnnnnnnnnnnnnnnnnnnnnnnnnnnnnnnnnnnnnnnnnnnnnnnnnnnnnnnnnnnnnnnnnnnnnnnnnnnnnnnnnnnnnnnnnnnnnnnnnnnnnnnnnnnnnnnnnnnnnnnnnnnnnnnnnnnnnnnnnnnnnnnnnnnnnnnnnnnnnnnnnnnnnnnnnnnnnnnnnnnnnnnnnnnnnnnnnnnnnnnnnnnnnnnnnnnnnnnnnnnnnnnnnnnnnnnnnnnnnnnnnnnnnnnnnnnnnnnnnnnnnnnnnnnnnnnnnnnnnnnnnnnnnnnnnnnnnnnnnnnnnnnnnnnnnnnnnnnnnnnnnnnnnnnnnnnnnnnnnnnnnnnnnnnnnnnnnnnnnnnnnnnnnnnnnnnnnnnnnnnnnnnnnnnnnnnnnnnnnnnnnnnnnnnnnnnnnnnnnnnnnnnnnnnnnnnnnnnnnnnnnnnnnnnnnnnnnnnnnnnnnnnnnnnnnnnnnnnnnnnnnnnnnnnnnnnnnnnnnnnnnnnnnnnnnnnnnnnnnnnnnnnnnnnnnnnnnnnnnnnnnnnnnnnnnnnnnnnnnnnnnnnnnnnnnnnnnnnnnnnnnnnnnnnnnnnnnnnnnnnnnnnnnnnnnnnnnnnnnnnnnnnnnnnnnnnnnnnnnnnnnnnnnnnnnnnnnnnnnnnnnnnnnnnnnnnnnnnnnnnnnnnnnnnnnnnnnnnnnnnnnnnnnnnnnnnnnnnnnnnnnnnnnnnnnnnnnnnnnnnnnnnnnnnnnnnnnnnnnnnnnnnnnnnnnnnnnnnnnnnnnnnnnnnnnnnnnnnnnnnnnnnnnnnnnnnnnnnnnnnnnnnnnnnnnnnnnnnnnnnnnnnnnnnnnnnnnnnnnnnnnnnnnnnnnnnnnnnnnnnnnnnnnnnnnnnnnnnnnnnnnnnnnnnnnnnnnnnnnnnnnnnnnnnnnnnnnnnnnnnnnnnnnnnnnnnnnnnnnnnnnnnnnnnnnnnnnnnnnnnnnnnnnnnnnnnnnnnnnnnnnnnnnnnnnnnnnnnnnnnnnnnnnnnnnnnnnnnnnnnnnnnnnnnnnnnnnnnnnnnnnnnnnnnnnnnnnnnnnnnnnnnnnnnnnnnnnnnnnnnnnnnnnnnnnnnnnnnnnnnnnnnnnnnnnnnnnnnnnnnnnnnnnnnnnnnnnnnnnnnnnnnnnnnnnnnnnnnnnnnnnnnnnnnnnnnnnnnnnnnnnnnnnnnnnnnnnnnnnnnnnnnnnnnnnnnnnnnnnnnnnnnnnnnnnnnnnnnnnnnnnnnnnnnnnnnnnnnnnnnnnnnnnnnnnnnnnnnnnnnnnnnnnnnnnnnnnnnnnnnnnnnnnnnnnnnnnnnnnnnnnnnnnnnnnnnnnnnnnnnnnnnnnnnnnnnnnnnnnnnnnnnnnnnnnnnnnnnnnnnnnnnnnnnnnnnnnnnnnnnnnnnnnnnnnnnnnnnnnnnnnnnnnnnnnnnnnnnnnnnnnnnnnnnnnnnnnnnnnnnnnnnnnnnnnnnnnnnnnnnnnnnnnnnnnnnnnnnnnnnnnnnnnnnnnnnnnnnnnnnnnnnnnnnnnnnnnnnnnnnnnnnnnnnnnnnnnnnnnnnnnnnnnnnnnnnnnnnnnnnnnnnnnnnnnnnnnnnnnnnnnnnnnnnnnnnnnnnnnnnnnnnnnnnnnnnnnnnnnnnnnnnnnnnnnnnnnnnnnnnnnnnnnnnnnnnnnnnnnnnnnnnnnnnnnnnnnnnnnnnnnnnnnnnnnnnnnnnnnnnnnnnnnnnnnnnnnnnnnnnnnnnnnnnnnnnnnnnnnnnnnnnnnnnnnnnnnnnnnnnnnnnnnnnnnnnnnnnnnnnnnnnnnnnnnnnnnnnnnnnnnnnnnnnnnnnnnnnnnnnnnnnnnnnnnnnnnnnnnnnnnnnnnnnnnnnnnnnnnnnnnnnnnnnnnnnnnnnnnnnnnnnnnnnnnnnnnnnnnnnnnnnnnnnnnnnnnnnnnnnnnnnnnnnnnnnnnnnnnnnnnnnnnnnnnnnnnnnnnnnnnnnnnnnnnnnnnnnnnnnnnnnnnnnnnnnnnnnnnnnnnnnnnnnnnnnnnnnnnnnnnnnnnnnnnnnnnnnnnnnnnnnnnnnnnnnnnnnnnnnnnnnnnnnnnnnnnnnnnnnnnnnnnnnnnnnnnnnnnnnnnnnnnnnnnnnnnnnnnnnnnnnnnnnnnnnnnnnnnnnnnnnnnnnnnnnnnnnnnnnnnnnnnnnnnnnnnnnnnnnnnnnnnnnnnnnnnnnnnnnnnnnnnnnnnnnnnnnnnnnnnnnnnnnnnnnnnnnnnnnnnnnnnnnnnnnnnnnnnnnnnnnnnnnnnnnnnnnnnnnnnnnnnnnnnnnnnnnnnnnnnnnnnnnnnnnnnnnnnnnnnnnnnnnnnnnnnnnnnnnnnnnnnnnnnnnnnnnnnnnnnnnnnnnnnnnnnnnnnnnnnnnnnnnnnnnnnnnnnnnnnnnnnnnnnnnnnnnnnnnnnnnnnnnnnnnnnnnnnnnnnnnnnnnnnnnnnnnnnnnnnnnnnnnnnnnnnnnnnnnnnnnnnnnnnnnnnnnnnnnnnnnnnnnnnnnnnnnnnnnnnnnnnnnnnnnnnnnnnnnnnnnnnnnnnnnnnnnnnnnnnnnnnnnnnnnnnnnnnnnnnnnnnnnnnnnnnnnnnnnnnnnnnnnnnnnnnnnnnnnnnnnnnnnnnnnnnnnnnnnnnnnnnnnnnnnnnnnnnnnnnnnnnnnnnnnnnnnnnnnnnnnnnnnnnnnnnnnnnnnnnnnnnnnnnnnnnnnnnnnnnnnnnnnnnnnnnnnnnnnnnnnnnnnnnnnnnnnnnnnnnnnnnnnnnnnnnnnnnnnnnnnnnnnnnnnnnnnnnnnnnnnnnnnnnnnnnnnnnnnnnnnnnnnnnnnnnnnnnnnnnnnnnnnnnnnnnnnnnnnnnnnnnnnnnnnnnnnnnnnnnnnnnnnnnnnnnnnnnnnnnnnnnnnnnnnnnnnnnnnnnnnnnnnnnnnnnnnnnnnnnnnnnnnnnnnnnnnnnnnnnnnnnnnnnnnnnnnnnnnnnnnnnnnnnnnnnnnnnnnnnnnnnnnnnnnnnnnnnnnnnnnnnnnnnnnnnnnnnnnnnnnnnnnnnnnnnnnnnnnnnnnnnnnnnnnnnnnnnnnnnnnnnnnnnnnnnnnnnnnnnnnnnnnnnnnnnnnnnnnnnnnnnnnnnnnnnnnnnnnnnnnnnnnnnnnnnnnnnnnnnnnnnnnnnnnnnnnnnnnnnnnnnnnnnnnnnnnnnnnnnnnnnnnnnnnnnnnnnnnnnnnnnnnnnnnnnnnnnnnnnnnnnnnnnnnnnnnnnnnnnnnnnnnnnnnnnnnnnnnnnnnnnnnnnnnnnnnnnnnnnnnnnnnnnnnnnnnnnnnnnnnnnnnnnnnnnnnnnnnnnnnnnnnnnnnnnnnnnnnnnnnnnnnnnnnnnnnnnnnnnnnnnnnnnnnnnnnnnnnnnnnnnnnnnnnnnnnnnnnnnnnnnnnnnnnnnnnnnnnnnnnnnnnnnnnnnnnnnnnnnnnnnnnnnnnnnnnnnnnnnnnnnnnnnnnnnnnnnnnnnnnnnnnnnnnnnnnnnnnnnnnnnnnnnnnnnnnnnnnnnnnnnnnnnnnnnnnnnnnnnnnnnnnnnnnnnnnnnnnnnnnnnnnnnnnnnnnnnnnnnnnnnnnnnnnnnnnnnnnnnnnnnnnnnnnnnnnnnnnnnnnnnnnnnnnnnnnnnnnnnnnnnnnnnnnnnnnnnnnnnnnnnnnnnnnnnnnnnnnnnnnnnnnnnnnnnnnnnnnnnnnnnnnnnnnnnnnnnnnnnnnnnnnnnnnnnnnnnnnnnnnnnnnnnnnnnnnnnnnnnnnnnnnnnnnnnnnnnnnnnnnnnnnnnnnnnnnnnnnnnnnnnnnnnnnnnnnnnnnnnnnnnnnnnnnnnnnnnnnnnnnnnnnnnnnnnnnnnnnnnnnnnnnnnnnnnnnnnnnnnnnnnnnnnnnnnnnnnnnnnnnnnnnnnnnnnnnnnnnnnnnnnnnnnnnnnnnnnnnnnnnnnnnnnnnnnnnnnnnnnnnnnnnnnnnnnnnnnnnnnnnnnnnnnnnnnnnnnnnnnnnnnnnnnnnnnnnnnnnnnnnnnnnnnnnnnnnnnnnnnnnnnnnnnnnnnnnnnnnnnnnnnnnnnnnnnnnnnnnnnnnnnnnnnnnnnnnnnnnnnnnnnnnnnnnnnnnnnnnnnnnnnnnnnnnnnnnnnnnnnnnnnnnnnnnnnnnnnnnnnnnnnnnnnnnnnnnnnnnnnnnnnnnnnnnnnnnnnnnnnnnnnnnnnnnnnnnnnnnnnnnnnnnnnnnnnnnnnnnnnnnnnnnnnnnnnnnnnnnnnnnnnnnnnnnnnnnnnnnnnnnnnnnnnnnnnnnnnnnnnnnnnnnnnnnnnnnnnnnnnnnnnnnnnnnnnnnnnnnnnnnnnnnnnnnnnnnnnnnnnnnnnnnnnnnnnnnnnnnnnnnnnnnnnnnnnnnnnnnnnnnnnnnnnnnnnnnnnnnnnnnnnnnnnnnnnnnnnnnnnnnnnnnnnnnnnnnnnnnnnnnnnnnnnnnnnnnnnnnnnnnnnnnnnnnnnnnnnnnnnnnnnnnnnnnnnnnnnnnnnnnnnnnnnnnnnnnnnnnnnnnnnnnnnnnnnnnnnnnnnnnnnnnnnnnnnnnnnnnnnnnnnnnnnnnnnnnnnnnnnnnnnnnnnnnnnnnnnnnnnnnnnnnnnnnnnnnnnnnnnnnnnnnnnnnnnnnnnnnnnnnnnnnnnnnnnnnnnnnnnnnnnnnnnnnnnnnnnnnnnnnnnnnnnnnnnnnnnnnnnnnnnnnnnnnnnnnnnnnnnnnnnnnnnnnnnnnnnnnnnnnnnnnnnnnnnnnnnnnnnnnnnnnnnnnnnnnnnnnnnnnnnnnnnnnnnnnnnnnnnnnnnnnnnnnnnnnnnnnnnnnnnnnnnnnnnnnnnnnnnnnnnnnnnnnnnnnnnnnnnnnnnnnnnnnnnnnnnnnnnnnnnnnnnnnnnnnnnnnnnnnnnnnnnnnnnnnnnnnnnnnnnnnnnnnnnnnnnnnnnnnnnnnnnnnnnnnnnnnnnnnnnnnnnnnnnnnnnnnnnnnnnnnnnnnnnnnnnnnnnnnnnnnnnnnnnnnnnnnnnnnnnnnnnnnnnnnnnnnnnnnnnnnnnnnnnnnnnnnnnnnnnnnnnnnnnnnnnnnnnnnnnnnnnnnnnnnnnnnnnnnnnnnnnnnnnnnnnnnnnnnnnnnnnnnnnnnnnnnnnnnnnnnnnnnnnnnnnnnnnnnnnnnnnnnnnnnnnnnnnnnnnnnnnnnnnnnnnnnnnnnnnnnnnnnnnnnnnnnnnnnnnnnnnnnnnnnnnnnnnnnnnnnnnnnnnnnnnnnnnnnnnnnnnnnnnnnnnnnnnnnnnnnnnnnnnnnnnnnnnnnnnnnnnnnnnnnnnnnnnnnnnnnnnnnnnnnnnnnnnnnnnnnnnnnnnnnnnnnnnnnnnnnnnnnnnnnnnnnnnnnnnnnnnnnnnnnnnnnnnnnnnnnnnnnnnnnnnnnnnnnnnnnnnnnnnnnnnnnnnnnnnnnnnnnnnnnnnnnnnnnnnnnnnnnnnnnnnnnnnnnnnnnnnnnnnnnnnnnnnnnnnnnnnnnnnnnnnnnnnnnnnnnnnnnnnnnnnnnnnnnnnnnnnnnnnnnnnnnnnnnnnnnnnnnnnnnnnnnnnnnnnnnnnnnnnnnnnnnnnnnnnnnnnnnnnnnnnnnnnnnnnnnnnnnnnnnnnnnnnnnnnnnnnnnnnnnnnnnnnnnnnnnnnnnnnnnnnnnnnnnnnnnnnnnnnnnnnnnnnnnnnnnnnnnnnnnnnnnnnnnnnnnnnnnnnnnnnnnnnnnnnnnnnnnnnnnnnnnnnnnnnnnnnnnnnnnnnnnnnnnnnnnnnnnnnnnnnnnnnnnnnnnnnnnnnnnnnnnnnnnnnnnnnnnnnnnnnnnnnnnnnnnnnnnnnnnnnnnnnnnnnnnnnnnnnnnnnnnnnnnnnnnnnnnnnnnnnnnnnnnnnnnnnnnnnnnnnnnnnnnnnnnnnnnnnnnnnnnnnnnnnnnnnnnnnnnnnnnnnnnnnnnnnnnnnnnnnnnnnnnnnnnnnnnnnnnnnnnnnnnnnnnnnnnnnnnnnnnnnnnnnnnnnnnnnnnnnnnnnnnnnnnnnnnnnnnnnnnnnnnnnnnnnnnnnnnnnnnnnnnnnnnnnnnnnnnnnnnnnnnnnnnnnnnnnnnnnnnnnnnnnnnnnnnnnnnnnnnnnnnnnnnnnnnnnnnnnnnnnnnnnnnnnnnnnnnnnnnnnnnnnnnnnnnnnnnnnnnnnnnnnnnnnnnnnnnnnnnnnnnnnnnnnnnnnnnnnnnnnnnnnnnnnnnnnnnnnnnnnnnnnnnnnnnnnnnnnnnnnnnnnnnnnnnnnnnnnnnnnnnnnnnnnnnnnnnnnnnnnnnnnnnnnnnnnnnnnnnnnnnnnnnnnnnnnnnnnnnnnnnnnnnnnnnnnnnnnnnnnnnnnnnnnnnnnnnnnnnnnnnnnnnnnnnnnnnnnnnnnnnnnnnnnnnnnnnnnnnnnnnnnnnnnnnnnnnnnnnnnnnnnnnnnnnnnnnnnnnnnnnnnnnnnnnnnnnnnnnnnnnnnnnnnnnnnnnnnnnnnnnnnnnnnnnnnnnnnnnnnnnnnnnnnnnnnnnnnnnnnnnnnnnnnnnnnnnnnnnnnnnnnnnnnnnnnnnnnnnnnnnnnnnnnnnnnnnnnnnnnnnnnnnnnnnnnnnnnnnnnnnnnnnnnnnnnnnnnnnnnnnnnnnnnnnnnnnnnnnnnnnnnnnnnnnnnnnnnnnnnnnnnnnnnnnnnnnnnnnnnnnnnnnnnnnnnnnnnnnnnnnnnnnnnnnnnnnnnnnnnnnnnnnnnnnnnnnnnnnnnnnnnnnnnnnnnnnnnnnnnnnnnnnnnnnnnnnnnnnnnnnnnnnnnnnnnnnnnnnnnnnnnnnnnnnnnnnnnnnnnnnnnnnnnnnnnnnnnnnnnnnnnnnnnnnnnnnnnnnnnnnnnnnnnnnnnnnnnnnnnnnnnnnnnnnnnnnnnnnnnnnnnnnnnnnnnnnnnnnnnnnnnnnnnnnnnnnnnnnnnnnnnnnnnnnnnnnnnnnnnnnnnnnnnnnnnnnnnnnnnnnnnnnnnnnnnnnnnnnnnnnnnnnnnnnnnnnnnnnnnnnnnnnnnnnnnnnnnnnnnnnnnnnnnnnnnnnnnnnnnnnnnnnnnnnnnnnnnnnnnnnnnnnnnnnnnnnnnnnnnnnnnnnnnnnnnnnnnnnnnnnnnnnnnnnnnnnnnnnnnnnnnnnnnnnnnnnnnnnnnnnnnnnnnnnnnnnnnnnnnnnnnnnnnnnnnnnnnnnnnnnnnnnnnnnnnnnnnnnnnnnnnnnnnnnnnnnnnnnnnnnnnnnnnnnnnnnnnnnnnnnnnnnnnnnnnnnnnnnnnnnnnnnnnnnnnnnnnnnnnnnnnnnnnnnnnnnnnnnnnnnnnnnnnnnnnnnnnnnnnnnnnnnnnnnnnnnnnnnnnnnnnnnnnnnnnnnnnnnnnnnnnnnnnnnnnnnnnnnnnnnnnnnnnnnnnnnnnnnnnnnnnnnnnnnnnnnnnnnnnnnnnnnnnnnnnnnnnnnnnnnnnnnnnnnnnnnnnnnnnnnnnnnnnnnnnnnnnnnnnnnnnnnnnnnnnnnnnnnnnnnnnnnnnnnnnnnnnnnnnnnnnnnnnnnnnnnnnnnnnnnnnnnnnnnnnnnnnnnnnnnnnnnnnnnnnnnnnnnnnnnnnnnnnnnnnnnnnnnnnnnnnnnnnnnnnnnnnnnnnnnnnnnnnnnnnnnnnnnnnnnnnnnnnnnnnnnnnnnnnnnnnnnnnnnnnnnnnnnnnnnnnnnnnnnnnnnnnnnnnnnnnnnnnnnnnnnnnnnnnnnnnnnnnnnnnnnnnnnnnnnnnnnnnnnnnnnnnnnnnnnnnnnnnnnnnnnnnnnnnnnnnnnnnnnnnnnnnnnnnnnnnnnnnnnnnnnnnnnnnnnnnnnnnnnnnnnnnnnnnnnnnnnnnnnnnnnnnnnnnnnnnnnnnnnnnnnnnnnnnnnnnnnnnnnnnnnnnnnnnnnnnnnnnnnnnnnnnnnnnnnnnnnnnnnnnnnnnnnnnnnnnnnnnnnnnnnnnnnnnnnnnnnnnnnnnnnnnnnnnnnnnnnnnnnnnnnnnnnnnnnnnnnnnnnnnnnnnnnnnnnnnnnnnnnnnnnnnnnnnnnnnnnnnnnnnnnnnnnnnnnnnnnnnnnnnnnnnnnnnnnnnnnnnnnnnnnnnnnnnnnnnnnnnnnnnnnnnnnnnnnnnnnnnnnnnnnnnnnnnnnnnnnnnnnnnnnnnnnnnnnnnnnnnnnnnnnnnnnnnnnnnnnnnnnnnnnnnnnnnnnnnnnnnnnnnnnnnnnnnnnnnnnnnnnnnnnnnnnnnnnnnnnnnnnnnnnnnnnnnnnnnnnnnnnnnnnnnnnnnnnnnnnnnnnnnnnnnnnnnnnnnnnnnnnnnnnnnnnnnnnnnnnnnnnnnnnnnnnnnnnnnnnnnnnnnnnnnnnnnnnnnnnnnnnnnnnnnnnnnnnnnnnnnnnnnnnnnnnnnnnnnnnnnnnnnnnnnnnnnnnnnnnnnnnnnnnnnnnnnnnnnnnnnnnnnnnnnnnnnnnnnnnnnnnnnnnnnnnnnnnnnnnnnnnnnnnnnnnnnnnnnnnnnnnnnnnnnnnnnnnnnnnnnnnnnnnnnnnnnnnnnnnnnnnnnnnnnnnnnnnnnnnnnnnnnnnnnnnnnnnnnnnnnnnnnnnnnnnnnnnnnnnnnnnnnnnnnnnnnnnnnnnnnnnnnnnnnnnnnnnnnnnnnnnnnnnnnnnnnnnnnnnnnnnnnnnnnnnnnnnnnnnnnnnnnnnnnnnnnnnnnnnnnnnnnnnnnnnnnnnnnnnnnnnnnnnnnnnnnnnnnnnnnnnnnnnnnnnnnnnnnnnnnnnnnnnnnnnnnnnnnnnnnnnnnnnnnnnnnnnnnnnnnnnnnnnnnnnnnnnnnnnnnnnnnnnnnnnnnnnnnnnnnnnnnnnnnnnnnnnnnnnnnnnnnnnnnnnnnnnnnnnnnnnnnnnnnnnnnnnnnnnnnnnnnnnnnnnnnnnnnnnnnnnnnnnnnnnnnnnnnnnnnnnnnnnnnnnnnnnnnnnnnnnnnnnnnnnnnnnnnnnnnnnnnnnnnnnnnnnnnnnnnnnnnnnnnnnnnnnnnnnnnnnnnnnnnnnnnnnnnnnnnnnnnnnnnnnnnnnnnnnnnnnnnnnnnnnnnnnnnnnnnnnnnnnnnnnnnnnnnnnnnnnnnnnnnnnnnnnnnnnnnnnnnnnnnnnnnnnnnnnnnnnnnnnnnnnnnnnnnnnnnnnnnnnnnnnnnnnnnnnnnnnnnnnnnnnnnnnnnnnnnnnnnnnnnnnnnnnnnnnnnnnnnnnnnnnnnnnnnnnnnnnnnnnnnnnnnnnnnnnnnnnnnnnnnnnnnnnnnnnnnnnnnnnnnnnnnnnnnnnnnnnnnnnnnnnnnnnnnnnnnnnnnnnnnnnnnnnnnnnnnnnnnnnnnnnnnnnnnnnnnnnnnnnnnnnnnnnnnnnnnnnnnnnnnnnnnnnnnnnnnnnnnnnnnnnnnnnnnnnnnnnnnnnnnnnnnnnnnnnnnnnnnnnnnnnnnnnnnnnnnnnnnnnnnnnnnnnnnnnnnnnnnnnnnnnnnnnnnnnnnnnnnnnnnnnnnnnnnnnnnnnnnnnnnnnnnnnnnnnnnnnnnnnnnnnnnnnnnnnnnnnnnnnnnnnnnnnnnnnnnnnnnnnnnnnnnnnnnnnnnnnnnnnnnnnnnnnnnnnnnnnnnnnnnnnnnnnnnnnnnnnnnnnnnnnnnnnnnnnnnnnnnnnnnnnnnnnnnnnnnnnnnnnnnnnnnnnnnnnnnnnnnnnnnnnnnnnnnnnnnnnnnnnnnnnnnnnnnnnnnnnnnnnnnnnnnnnnnnnnnnnnnnnnnnnnnnnnnnnnnnnnnnnnnnnnnnnnnnnnnnnnnnnnnnnnnnnnnnnnnnnnnnnnnnnnnnnnnnnnnnnnnnnnnnnnnnnnnnnnnnnnnnnnnnnnnnnnnnnnnnnnnnnnnnnnnnnnnnnnnnnnnnnnnnnnnnnnnnnnnnnnnnnnnnnnnnnnnnnnnnnnnnnnnnnnnnnnnnnnnnnnnnnnnnnnnnnnnnnnnnnnnnnnnnnnnnnnnnnnnnnnnnnnnnnnnnnnnnnnnnnnnnnnnnnnnnnnnnnnnnnnnnnnnnnnnnnnnnnnnnnnnnnnnnnnnnnnnnnnnnnnnnnnnnnnnnnnnnnnnnnnnnnnnnnnnnnnnnnnnnnnnnnnnnnnnnnnnnnnnnnnnnnnnnnnnnnnnnnnnnnnnnnnnnnnnnnnnnnnnnnnnnnnnnnnnnnnnnnnnnnnnnnnnnnnnnnnnnnnnnnnnnnnnnnnnnnnnnnnnnnnnnnnnnnnnnnnnnnnnnnnnnnnnnnnnnnnnnnnnnnnnnnnnnnnnnnnnnnnnnnnnnnnnnnnnnnnnnnnnnnnnnnnnnnnnnnnnnnnnnnnnnnnnnnnnnnnnnnnnnnnnnnnnnnnnnnnnnnnnnnnnnnnnnnnnnnnnnnnnnnnnnnnnnnnnnnnnnnnnnnnnnnnnnnnnnnnnnnnnnnnnnnnnnnnnnnnnnnnnnnnnnnnnnnnnnnnnnnnnnnnnnnnnnnnnnnnnnnnnnnnnnnnnnnnnnnnnnnnnnnnnnnnnnnnnnnnnnnnnnnnnnnnnnnnnnnnnnnnnnnnnnnnnnnnnnnnnnnnnnnnnnnnnnnnnnnnnnnnnnnnnnnnnnnnnnnnnnnnnnnnnnnnnnnnnnnnnnnnnnnnnnnnnnnnnnnnnnnnnnnnnnnnnnnnnnnnnnnnnnnnnnnnnnnnnnnnnnnnnnnnnnnnnnnnnnnnnnnnnnnnnnnnnnnnnnnnnnnnnnnnnnnnnnnnnnnnnnnnnnnnnnnnnnnnnnnnnnnnnnnnnnnnnnnnnnnnnnnnnnnnnnnnnnnnnnnnnnnnnnnnnnnnnnnnnnnnnnnnnnnnnnnnnnnnnnnnnnnnnnnnnnnnnnnnnnnnnnnnnnnnnnnnnnnnnnnnnnnnnnnnnnnnnnnnnnnnnnnnnnnnnnnnnnnnnnnnnnnnnnnnnnnnnnnnnnnnnnnnnnnnnnnnnnnnnnnnnnnnnnnnnnnnnnnnnnnnnnnnnnnnnnnnnnnnnnnnnnnnnnnnnnnnnnnnnnnnnnnnnnnnnnnnnnnnnnnnnnnnnnnnnnnnnnnnnnnnnnnnnnnnnnnnnnnnnnnnnnnnnnnnnnnnnnnnnnnnnnnnnnnnnnnnnnnnnnnnnnnnnnnnnnnnnnnnnnnnnnnnnnnnnnnnnnnnnnnnnnnnnnnnnnnnnnnnnnnnnnnnnnnnnnnnnnnnnnnnnnnnnnnnnnnnnnnnnnnnnnnnnnnnnnnnnnnnnnnnnnnnnnnnnnnnnnnnnnnnnnnnnnnnnnnnnnnnnnnnnnnnnnnnnnnnnnnnnnnnnnnnnnnnnnnnnnnnnnnnnnnnnnnnnnnnnnnnnnnnnnnnnnnnnnnnnnnnnnnnnnnnnnnnnnnnnnnnnnnnnnnnnnnnnnnnnnnnnnnnnnnnnnnnnnnnnnnnnnnnnnnnnnnnnnnnnnnnnnnnnnnnnnnnnnnnnnnnnnnnnnnnnnnnnnnnnnnnnnnnnnnnnnnnnnnnnnnnnnnnnnnnnnnnnnnnnnnnnnnnnnnnnnnnnnnnnnnnnnnnnnnnnnnnnnnnnnnnnnnnnnnnnnnnnnnnnnnnnnnnnnnnnnnnnnnnnnnnnnnnnnnnnnnnnnnnnnnnnnnnnnnnnnnnnnnnnnnnnnnnnnnnnnnnnnnnnnnnnnnnnnnnnnnnnnnnnnnnnnnnnnnnnnnnnnnnnnnnnnnnnnnnnnnnnnnnnnnnnnnnnnnnnnnnnnnnnnnnnnnnnnnnnnnnnnnnnnnnnnnnnnnnnnnnnnnnnnnnnnnnnnnnnnnnnnnnnnnnnnnnnnnnnnnnnnnnnnnnnnnnnnnnnnnnnnnnnnnnnnnnnnnnnnnnnnnnnnnnnnnnnnnnnnnnnnnnnnnnnnnnnnnnnnnnnnnnnnnnnnnnnnnnnnnnnnnnnnnnnnnnnnnnnnnnnnnnnnnnnnnnnnnnnnnnnnnnnnnnnnnnnnnnnnnnnnnnnnnnnnnnnnnnnnnnnnnnnnnnnnnnnnnnnnnnnnnnnnnnnnnnnnnnnnnnnnnnnnnnnnnnnnnnnnnnnnnnnnnnnnnnnnnnnnnnnnnnnnnnnnnnnnnnnnnnnnnnnnnnnnnnnnnnnnnnnnnnnnnnnnnnnnnnnnnnnnnnnnnnnnnnnnnnnnnnnnnnnnnnnnnnnnnnnnnnnnnnnnnnnnnnnnnnnnnnnnnnnnnnnnnnnnnnnnnnnnnnnnnnnnnnnnnnnnnnnnnnnnnnnnnnnnnnnnnnnnnnnnnnnnnnnnnnnnnnnnnnnnnnnnnnnnnnnnnnnnnnnnnnnnnnnnnnnnnnnnnnnnnnnnnnnnnnnnnnnnnnnnnnnnnnnnnnnnnnnnnnnnnnnnnnnnnnnnnnnnnnnnnnnnnnnnnnnnnnnnnnnnnnnnnnnnnnnnnnnnnnnnnnnnnnnnnnnnnnnnnnnnnnnnnnnnnnnnnnnnnnnnnnnnnnnnnnnnnnnnnnnnnnnnnnnnnnnnnnnnnnnnnnnnnnnnnnnnnnnnnnnnnnnnnnnnnnnnnnnnnnnnnnnnnnnnnnnnnnnnnnnnnnnnnnnnnnnnnnnnnnnnnnnnnnnnnnnnnnnnnnnnnnnnnnnnnnnnnnnnnnnnnnnnnnnnnnnnnnnnnnnnnnnnnnnnnnnnnnnnnnnnnnnnnnnnnnnnnnnnnnnnnnnnnnnnnnnnnnnnnnnnnnnnnnnnnnnnnnnnnnnnnnnnnnnnnnnnnnnnnnnnnnnnnnnnnnnnnnnnnnnnnnnnnnnnnnnnnnnnnnnnnnnnnnnnnnnnnnnnnnnnnnnnnnnnnnnnnnnnnnnnnnnnnnnnnnnnnnnnnnnnnnnnnnnnnnnnnnnnnnnnnnnnnnnnnnnnnnnnnnnnnnnnnnnnnnnnnnnnnnnnnnnnnnnnnnnnnnnnnnnnnnnnnnnnnnnnnnnnnnnnnnnnnnnnnnnnnnnnnnnnnnnnnnnnnnnnnnnnnnnnnnnnnnnnnnnnnnnnnnnnnnnnnnnnnnnnnnnnnnnnnnnnnnnnnnnnnnnnnnnnnnnnnnnnnnnnnnnnnnnnnnnnnnnnnnnnnnnnnnnnnnnnnnnnnnnnnnnnnnnnnnnnnnnnnnnnnnnnnnnnnnnnnnnnnnnnnnnnnnnnnnnnnnnnnnnnnnnnnnnnnnnnnnnnnnnnnnnnnnnnnnnnnnnnnnnnnnnnnnnnnnnnnnnnnnnnnnnnnnnnnnnnnnnnnnnnnnnnnnnnnnnnnnnnnnnnnnnnnnnnnnnnnnnnnnnnnnnnnnnnnnnnnnnnnnnnnnnnnnnnnnnnnnnnnnnnnnnnnnnnnnnnnnnnnnnnnnnnnnnnnnnnnnnnnnnnnnnnnnnnnnnnnnnnnnnnnnnnnnnnnnnnnnnnnnnnnnnnnnnnnnnnnnnnnnnnnnnnnnnnnnnnnnnnnnnnnnnnnnnnnnnnnnnnnnnnnnnnnnnnnnnnnnnnnnnnnnnnnnnnnnnnnnnnnnnnnnnnnnnnnnnnnnnnnnnnnnnnnnnnnnnnnnnnnnnnnnnnnnnnnnnnnnnnnnnnnnnnnnnnnnnnnnnnnnnnnnnnnnnnnnnnnnnnnnnnnnnnnnnnnnnnnnnnnnnnnnnnnnnnnnnnnnnnnnnnnnnnnnnnnnnnnnnnnnnnnnnnnnnnnnnnnnnnnnnnnnnnnnnnnnnnnnnnnnnnnnnnnnnnnnnnnnnnnnnnnnnnnnnnnnnnnnnnnnnnnnnnnnnnnnnnnnnnnnnnnnnnnnnnnnnnnnnnnnnnnnnnnnnnnnnnnnnnnnnnnnnnnnnnnnnnnnnnnnnnnnnnnnnnnnnnnnnnnnnnnnnnnnnnnnnnnnnnnnnnnnnnnnnnnnnnnnnnnnnnnnnnnnnnnnnnnnnnnnnnnnnnnnnnnnnnnnnnnnnnnnnnnnnnnnnnnnnnnnnnnnnnnnnnnnnnnnnnnnnnnnnnnnnnnnnnnnnnnnnnnnnnnnnnnnnnnnnnnnnnnnnnnnnnnnnnnnnnnnnnnnnnnnnnnnnnnnnnnnnnnnnnnnnnnnnnnnnnnnnnnnnnnnnnnnnnnnnnnnnnnnnnnnnnnnnnnnnnnnnnnnnnnnnnnnnnnnnnnnnnnnnnnnnnnnnnnnnnnnnnnnnnnnnnnnnnnnnnnnnnnnnnnnnnnnnnnnnnnnnnnnnnnnnnnnnnnnnnnnnnnnnnnnnnnnnnnnnnnnnnnnnnnnnnnnnnnnnnnnnnnnnnnnnnnnnnnnnnnnnnnnnnnnnnnnnnnnnnnnnnnnnnnnnnnnnnnnnnnnnnnnnnnnnnnnnnnnnnnnnnnnnnnnnnnnnnnnnnnnnnnnnnnnnnnnnnnnnnnnnnnnnnnnnnnnnnnnnnnnnnnnnnnnnnnnnnnnnnnnnnnnnnnnnnnnnnnnnnnnnnnnnnnnnnnnnnnnnnnnnnnnnnnnnnnnnnnnnnnnnnnnnnnnnnnnnnnnnnnnnnnnnnnnnnnnnnnnnnnnnnnnnnnnnnnnnnnnnnnnnnnnnnnnnnnnnnnnnnnnnnnnnnnnnnnnnnnnnnnnnnnnnnnnnnnnnnnnnnnnnnnnnnnnnnnnnnnnnnnnnnnnnnnnnnnnnnnnnnnnnnnnnnnnnnnnnnnnnnnnnnnnnnnnnnnnnnnnnnnnnnnnnnnnnnnnnnnnnnnnnnnnnnnnnnnnnnnnnnnnnnnnnnnnnnnnnnnnnnnnnnnnnnnnnnnnnnnnnnnnnnnnnnnnnnnnnnnnnnnnnnnnnnnnnnnnnnnnnnnnnnnnnnnnnnnnnnnnnnnnnnnnnnnnnnnnnnnnnnnnnnnnnnnnnnnnnnnnnnnnnnnnnnnnnnnnnnnnnnnnnnnnnnnnnnnnnnnnnnnnnnnnnnnnnnnnnnnnnnnnnnnnnnnnnnnnnnnnnnnnnnnnnnnnnnnnnnnnnnnnnnnnnnnnnnnnnnnnnnnnnnnnnnnnnnnnnnnnnnnnnnnnnnnnnnnnnnnnnnnnnnnnnnnnnnnnnnnnnnnnnnnnnnnnnnnnnnnnnnnnnnnnnnnnnnnnnnnnnnnnnnnnnnnnnnnnnnnnnnnnnnnnnnnnnnnnnnnnnnnnnnnnnnnnnnnnnnnnnnnnnnnnnnnnnnnnnnnnnnnnnnnnnnnnnnnnnnnnnnnnnnnnnnnnnnnnnnnnnnnnnnnnnnnnnnnnnnnnnnnnnnnnnnnnnnnnnnnnnnnnnnnnnnnnnnnnnnnnnnnnnnnnnnnnnnnnnnnnnnnnnnnnnnnnnnnnnnnnnnnnnnnnnnnnnnnnnnnnnnnnnnnnnnnnnnnnnnnnnnnnnnnnnnnnnnnnnnnnnnnnnnnnnnnnnnnnnnnnnnnnnnnnnnnnnnnnnnnnnnnnnnnnnnnnnnnnnnnnnnnnnnnnnnnnnnnnnnnnnnnnnnnnnnnnnnnnnnnnnnnnnnnnnnnnnnnnnnnnnnnnnnnnnnnnnnnnnnnnnnnnnnnnnnnnnnnnnnnnnnnnnnnnnnnnnnnnnnnnnnnnnnnnnnnnnnnnnnnnnnnnnnnnnnnnnnnnnnnnnnnnnnnnnnnnnnnnnnnnnnnnnnnnnnnnnnnnnnnnnnnnnnnnnnnnnnnnnnnnnnnnnnnnnnnnnnnnnnnnnnnnnnnnnnnnnnnnnnnnnnnnnnnnnnnnnnnnnnnnnnnnnnnnnnnnnnnnnnnnnnnnnnnnnnnnnnnnnnnnnnnnnnnnnnnnnnnnnnnnnnnnnnnnnnnnnnnnnnnnnnnnnnnnnnnnnnnnnnnnnnnnnnnnnnnnnnnnnnnnnnnnnnnnnnnnnnnnnnnnnnnnnnnnnnnnnnnnnnnnnnnnnnnnnnnnnnnnnnnnnnnnnnnnnnnnnnnnnnnnnnnnnnnnnnnnnnnnnnnnnnnnnnnnnnnnnnnnnnnnnnnnnnnnnnnnnnnnnnnnnnnnnnnnnnnnnnnnnnnnnnnnnnnnnnnnnnnnnnnnnnnnnnnnnnnnnnnnnnnnnnnnnnnnnnnnnnnnnnnnnnnnnnnnnnnnnnnnnnnnnnnnnnnnnnnnnnnnnnnnnnnnnnnnnnnnnnnnnnnnnnnnnnnnnnnnnnnnnnnnnnnnnnnnnnnnnnnnnnnnnnnnnnnnnnnnnnnnnnnnnnnnnnnnnnnnnnnnnnnnnnnnnnnnnnnnnnnnnnnnnnnnnnnnnnnnnnnnnnnnnnnnnnnnnnnnnnnnnnnnnnnnnnnnnnnnnnnnnnnnnnnnnnnnnnnnnnnnnnnnnnnnnnnnnnnnnnnnnnnnnnnnnnnnnnnnnnnnnnnnnnnnnnnnnnnnnnnnnnnnnnnnnnnnnnnnnnnnnnnnnnnnnnnnnnnnnnnnnnnnnnnnnnnnnnnnnnnnnnnnnnnnnnnnnnnnnnnnnnnnnnnnnnnnnnnnnnnnnnnnnnnnnnnnnnnnnnnnnnnnnnnnnnnnnnnnnnnnnnnnnnnnnnnnnnnnnnnnnnnnnnnnnnnnnnnnnnnnnnnnnnnnnnnnnnnnnnnnnnnnnnnnnnnnnnnnnnnnnnnnnnnnnnnnnnnnnnnnnnnnnnnnnnnnnnnnnnnnnnnnnnnnnnnnnnnnnnnnnnnnnnnnnnnnnnnnnnnnnnnnnnnnnnnnnnnnnnnnnnnnnnnnnnnnnnnnnnnnnnnnnnnnnnnnnnnnnnnnnnnnnnnnnnnnnnnnnnnnnnnnnnnnnnnnnnnnnnnnnnnnnnnnnnnnnnnnnnnnnnnnnnnnnnnnnnnnnnnnnnnnnnnnnnnnnnnnnnnnnnnnnnnnnnnnnnnnnnnnnnnnnnnnnnnnnnnnnnnnnnnnnnnnnnnnnnnnnnnnnnnnnnnnnnnnnnnnnnnnnnnnnnnnnnnnnnnnnnnnnnnnnnnnnnnnnnnnnnnnnnnnnnnnnnnnnnnnnnnnnnnnnnnnnnnnnnnnnnnnnnnnnnnnnnnnnnnnnnnnnnnnnnnnnnnnnnnnnnnnnnnnnnnnnnnnnnnnnnnnnnnnnnnnnnnnnnnnnnnnnnnnnnnnnnnnnnnnnnnnnnnnnnnnnnnnnnnnnnnnnnnnnnnnnnnnnnnnnnnnnnnnnnnnnnnnnnnnnnnnnnnnnnnnnnnnnnnnnnnnnnnnnnnnnnnnnnnnnnnnnnnnnnnnnnnnnnnnnnnnnnnnnnnnnnnnnnnnnnnnnnnnnnnnnnnnnnnnnnnnnnnnnnnnnnnnnnnnnnnnnnnnnnnnnnnnnnnnnnnnnnnnnnnnnnnnnnnnnnnnnnnnnnnnnnnnnnnnnnnnnnnnnnnnnnnnnnnnnnnnnnnnnnnnnnnnnnnnnnnnnnnnnnnnnnnnnnnnnnnnnnnnnnnnnnnnnnnnnnnnnnnnnnnnnnnnnnnnnnnnnnnnnnnnnnnnnnnnnnnnnnnnnnnnnnnnnnnnnnnnnnnnnnnnnnnnnnnnnnnnnnnnnnnnnnnnnnnnnnnnnnnnnnnnnnnnnnnnnnnnnnnnnnnnnnnnnnnnnnnnnnnnnnnnnnnnnnnnnnnnnnnnnnnnnnnnnnnnnnnnnnnnnnnnnnnnnnnnnnnnnnnnnnnnnnnnnnnnnnnnnnnnnnnnnnnnnnnnnnnnnnnnnnnnnnnnnnnnnnnnnnnnnnnnnnnnnnnnnnnnnnnnnnnnnnnnnnnnnnnnnnnnnnnnnnnnnnnnnnnnnnnnnnnnnnnnnnnnnnnnnnnnnnnnnnnnnnnnnnnnnnnnnnnnnnnnnnnnnnnnnnnnnnnnnnnnnnnnnnnnnnnnnnnnnnnnnnnnnnnnnnnnnnnnnnnnnnnnnnnnnnnnnnnnnnnnnnnnnnnnnnnnnnnnnnnnnnnnnnnnnnnnnnnnnnnnnnnnnnnnnnnnnnnnnnnnnnnnnnnnnnnnnnnnnnnnnnnnnnnnnnnnnnnnnnnnnnnnnnnnnnnnnnnnnnnnnnnnnnnnnnnnnnnnnnnnnnnnnnnnnnnnnnnnnnnnnnnnnnnnnnnnnnnnnnnnnnnnnnnnnnnnnnnnnnnnnnnnnnnnnnnnnnnnnnnnnnnnnnnnnnnnnnnnnnnnnnnnnnnnnnnnnnnnnnnnnnnnnnnnnnnnnnnnnnnnnnnnnnnnnnnnnnnnnnnnnnnnnnnnnnnnnnnnnnnnnnnnnnnnnnnnnnnnnnnnnnnnnnnnnnnnnnnnnnnnnnnnnnnnnnnnnnnnnnnnnnnnnnnnnnnnnnnnnnnnnnnnnnnnnnnnnnnnnnnnnnnnnnnnnnnnnnnnnnnnnnnnnnnnnnnnnnnnnnnnnnnnnnnnnnnnnnnnnnnnnnnnnnnnnnnnnnnnnnnnnnnnnnnnnnnnnnnnnnnnnnnnnnnnnnnnnnnnnnnnnnnnnnnnnnnnnnnnnnnnnnnnnnnnnnnnnnnnnnnnnnnnnnnnnnnnnnnnnnnnnnnnnnnnnnnnnnnnnnnnnnnnnnnnnnnnnnnnnnnnnnnnnnnnnnnnnnnnnnnnnnnnnnnnnnnnnnnnnnnnnnnnnnnnnnnnnnnnnnnnnnnnnnnnnnnnnnnnnnnnnnnnnnnnnnnnnnnnnnnnnnnnnnnnnnnnnnnnnnnnnnnnnnnnnnnnnnnnnnnnnnnnnnnnnnnnnnnnnnnnnnnnnnnnnnnnnnnnnnnnnnnnnnnnnnnnnnnnnnnnnnnnnnnnnnnnnnnnnnnnnnnnnnnnnnnnnnnnnnnnnnnnnnnnnnnnnnnnnnnnnnnnnnnnnnnnnnnnnnnnnnnnnnnnnnnnnnnnnnnnnnnnnnnnnnnnnnnnnnnnnnnnnnnnnnnnnnnnnnnnnnnnnnnnnnnnnnnnnnnnnnnnnnnnnnnnnnnnnnnnnnnnnnnnnnnnnnnnnnnnnnnnnnnnnnnnnnnnnnnnnnnnnnnnnnnnnnnnnnnnnnnnnnnnnnnnnnnnnnnnnnnnnnnnnnnnnnnnnnnnnnnnnnnnnnnnnnnnnnnnnnnnnnnnnnnnnnnnnnnnnnnnnnnnnnnnnnnnnnnnnnnnnnnnnnnnnnnnnnnnnnnnnnnnnnnnnnnnnnnnnnnnnnnnnnnnnnnnnnnnnnnnnnnnnnnnnnnnnnnnnnnnnnnnnnnnnnnnnnnnnnnnnnnnnnnnnnnnnnnnnnnnnnnnnnnnnnnnnnnnnnnnnnnnnnnnnnnnnnnnnnnnnnnnnnnnnnnnnnnnnnnnnnnnnnnnnnnnnnnnnnnnnnnnnnnnnnnnnnnnnnnnnnnnnnnnnnnnnnnnnnnnnnnnnnnnnnnnnnnnnnnnnnnnnnnnnnnnnnnnnnnnnnnnnnnnnnnnnnnnnnnnnnnnnnnnnnnnnnnnnnnnnnnnnnnnnnnnnnnnnnnnnnnnnnnnnnnnnnnnnnnnnnnnnnnnnnnnnnnnnnnnnnnnnnnnnnnnnnnnnnnnnnnnnnnnnnnnnnnnnnnnnnnnnnnnnnnnnnnnnnnnnnnnnnnnnnnnnnnnnnnnnnnnnnnnnnnnnnnnnnnnnnnnnnnnnnnnnnnnnnnnnnnnnnnnnnnnnnnnnnnnnnnnnnnnnnnnnnnnnnnnnnnnnnnnnnnnnnnnnnnnnnnnnnnnnnnnnnnnnnnnnnnnnnnnnnnnnnnnnnnnnnnnnnnnnnnnnnnnnnnnnnnnnnnnnnnnnnnnnnnnnnnnnnnnnnnnnnnnnnnnnnnnnnnnnnnnnnnnnnnnnnnnnnnnnnnnnnnnnnnnnnnnnnnnnnnnnnnnnnnnnnnnnnnnnnnnnnnnnnnnnnnnnnnnnnnnnnnnnnnnnnnnnnnnnnnnnnnnnnnnnnnnnnnnnnnnnnnnnnnnnnnnnnnnnnnnnnnnnnnnnnnnnnnnnnnnnnnnnnnnnnnnnnnnnnnnnnnnnnnnnnnnnnnnnnnnnnnnnnnnnnnnnnnnnnnnnnnnnnnnnnnnnnnnnnnnnnnnnnnnnnnnnnnnnnnnnnnnnnnnnnnnnnnnnnnnnnnnnnnnnnnnnnnnnnnnnnnnnnnnnnnnnnnnnnnnnnnnnnnnnnnnnnnnnnnnnnnnnnnnnnnnnnnnnnnnnnnnnnnnnnnnnnnnnnnnnnnnnnnnnnnnnnnnnnnnnnnnnnnnnnnnnnnnnnnnnnnnnnnnnnnnnnnnnnnnnnnnnnnnnnnnnnnnnnnnnnnnnnnnnnnnnnnnnnnnnnnnnnnnnnnnnnnnnnnnnnnnnnnnnnnnnnnnnnnnnnnnnnnnnnnnnnnnnnnnnnnnnnnnnnnnnnnnnnnnnnnnnnnnnnnnnnnnnnnnnnnnnnnnnnnnnnnnnnnnnnnnnnnnnnnnnnnnnnnnnnnnnnnnnnnnnnnnnnnnnnnnnnnnnnnnnnnnnnnnnnnnnnnnnnnnnnnnnnnnnnnnnnnnnnnnnnnnnnnnnnnnnnnnnnnnnnnnnnnnnnnnnnnnnnnnnnnnnnnnnnnnnnnnnnnnnnnnnnnnnnnnnnnnnnnnnnnnnnnnnnnnnnnnnnnnnnnnnnnnnnnnnnnnnnnnnnnnnnnnnnnnnnnnnnnnnnnnnnnnnnnnnnnnnnnnnnnnnnnnnnnnnnnnnnnnnnnnnnnnnnnnnnnnnnnnnnnnnnnnnnnnnnnnnnnnnnnnnnnnnnnnnnnnnnnnnnnnnnnnnnnnnnnnnnnnnnnnnnnnnnnnnnnnnnnnnnnnnnnnnnnnnnnnnnnnnnnnnnnnnnnnnnnnnnnnnnnnnnnnnnnnnnnnnnnnnnnnnnnnnnnnnnnnnnnnnnnnnnnnnnnnnnnnnnnnnnnnnnnnnnnnnnnnnnnnnnnnnnnnnnnnnnnnnnnnnnnnnnnnnnnnnnnnnnnnnnnnnnnnnnnnnnnnnnnnnnnnnnnnnnnnnnnnnnnnnnnnnnnnnnnnnnnnnnnnnnnnnnnnnnnnnnnnnnnnnnnnnnnnnnnnnnnnnnnnnnnnnnnnnnnnnnnnnnnnnnnnnnnnnnnnnnnnnnnnnnnnnnnnnnnnnnnnnnnnnnnnnnnnnnnnnnnnnnnnnnnnnnnnnnnnnnnnnnnnnnnnnnnnnnnnnnnnnnnnnnnnnnnnnnnnnnnnnnnnnnnnnnnnnnnnnnnnnnnnnnnnnnnnnnnnnnnnnnnnnnnnnnnnnnnnnnnnnnnnnnnnnnnnnnnnnnnnnnnnnnnnnnnnnnnnnnnnnnnnnnnnnnnnnnnnnnnnnnnnnnnnnnnnnnnnnnnnnnnnnnnnnnnnnnnnnnnnnnnnnnnnnnnnnnnnnnnnnnnnnnnnnnnnnnnnnnnnnnnnnnnnnnnnnnnnnnnnnnnnnnnnnnnnnnnnnnnnnnnnnnnnnnnnnnnnnnnnnnnnnnnnnnnnnnnnnnnnnnnnnnnnnnnnnnnnnnnnnnnnnnnnnnnnnnnnnnnnnnnnnnnnnnnnnnnnnnnnnnnnnnnnnnnnnnnnnnnnnnnnnnnnnnnnnnnnnnnnnnnnnnnnnnnnnnnnnnnnnnnnnnnnnnnnnnnnnnnnnnnnnnnnnnnnnnnnnnnnnnnnnnnnnnnnnnnnnnnnnnnnnnnnnnnnnnnnnnnnnnnnnnnnnnnnnnnnnnnnnnnnnnnnnnnnnnnnnnnnnnnnnnnnnnnnnnnnnnnnnnnnnnnnnnnnnnnnnnnnnnnnnnnnnnnnnnnnnnnnnnnnnnnnnnnnnnnnnnnnnnnnnnnnnnnnnnnnnnnnnnnnnnnnnnnnnnnnnnnnnnnnnnnnnnnnnnnnnnnnnnnnnnnnnnnnnnnnnnnnnnnnnnnnnnnnnnnnnnnnnnnnnnnnnnnnnnnnnnnnnnnnnnnnnnnnnnnnnnnnnnnnnnnnnnnnnnnnnnnnnnnnnnnnnnnnnnnnnnnnnnnnnnnnnnnnnnnnnnnnnnnnnnnnnnnnnnnnnnnnnnnnnnnnnnnnnnnnnnnnnnnnnnnnnnnnnnnnnnnnnnnnnnnnnnnnnnnnnnnnnnnnnnnnnnnnnnnnnnnnnnnnnnnnnnnnnnnnnnnnnnnnnnnnnnnnnnnnnnnnnnnnnnnnnnnnnnnnnnnnnnnnnnnnnnnnnnnnnnnnnnnnnnnnnnnnnnnnnnnnnnnnnnnnnnnnnnnnnnnnnnnnnnnnnnnnnnnnnnnnnnnnnnnnnnnnnnnnnnnnnnnnnnnnnnnnnnnnnnnnnnnnnnnnnnnnnnnnnnnnnnnnnnnnnnnnnnnnnnnnnnnnnnnnnnnnnnnnnnnnnnnnnnnnnnnnnnnnnnnnnnnnnnnnnnnnnnnnnnnnnnnnnnnnnnnnnnnnnnnnnnnnnnnnnnnnnnnnnnnnnnnnnnnnnnnnnnnnnnnnnnnnnnnnnnnnnnnnnnnnnnnnnnnnnnnnnnnnnnnnnnnnnnnnnnnnnnnnnnnnnnnnnnnnnnnnnnnnnnnnnnnnnnnnnnnnnnnnnnnnnnnnnnnnnnnnnnnnnnnnnnnnnnnnnnnnnnnnnnnnnnnnnnnnnnnnnnnnnnnnnnnnnnnnnnnnnnnnnnnnnnnnnnnnnnnnnnnnnnnnnnnnnnnnnnnnnnnnnnnnnnnnnnnnnnnnnnnnnnnnnnnnnnnnnnnnnnnnnnnnnnnnnnnnnnnnnnnnnnnnnnnnnnnnnnnnnnnnnnnnnnnnnnnnnnnnnnnnnnnnnnnnnnnnnnnnnnnnnnnnnnnnnnnnnnnnnnnnnnnnnnnnnnnnnnnnnnnnnnnnnnnnnnnnnnnnnnnnnnnnnnnnnnnnnnnnnnnnnnnnnnnnnnnnnnnnnnnnnnnnnnnnnnnnnnnnnnnnnnnnnnnnnnnnnnnnnnnnnnnnnnnnnnnnnnnnnnnnnnnnnnnnnnnnnnnnnnnnnnnnnnnnnnnnnnnnnnnnnnnnnnnnnnnnnnnnnnnnnnnnnnnnnnnnnnnnnnnnnnnnnnnnnnnnnnnnnnnnnnnnnnnnnnnnnnnnnnnnnnnnnnnnnnnnnnnnnnnnnnnnnnnnnnnnnnnnnnnnnnnnnnnnnnnnnnnnnnnnnnnnnnnnnnnnnnnnnnnnnnnnnnnnnnnnnnnnnnnnnnnnnnnnnnnnnnnnnnnnnnnnnnnnnnnnnnnnnnnnnnnnnnnnnnnnnnnnnnnnnnnnnnnnnnnnnnnnnnnnnnnnnnnnnnnnnnnnnnnnnnnnnnnnnnnnnnnnnnnnnnnnnnnnnnnnnnnnnnnnnnnnnnnnnnnnnnnnnnnnnnnnnnnnnnnnnnnnnnnnnnnnnnnnnnnnnnnnnnnnnnnnnnnnnnnnnnnnnnnnnnnnnnnnnnnnnnnnnnnnnnnnnnnnnnnnnnnnnnnnnnnnnnnnnnnnnnnnnnnnnnnnnnnnnnnnnnnnnnnnnnnnnnnnnnnnnnnnnnnnnnnnnnnnnnnnnnnnnnnnnnnnnnnnnnnnnnnnnnnnnnnnnnnnnnnnnnnnnnnnnnnnnnnnnnnnnnnnnnnnnnnnnnnnnnnnnnnnnnnnnnnnnnnnnnnnnnnnnnnnnnnnnnnnnnnnnnnnnnnnnnnnnnnnnnnnnnnnnnnnnnnnnnnnnnnnnnnnnnnnnnnnnnnnnnnnnnnnnnnnnnnnnnnnnnnnnnnnnnnnnnnnnnnnnnnnnnnnnnnnnnnnnnnnnnnnnnnnnnnnnnnnnnnnnnnnnnnnnnnnnnnnnnnnnnnnnnnnnnnnnnnnnnnnnnnnnnnnnnnnnnnnnnnnnnnnnnnnnnnnnnnnnnnnnnnnnnnnnnnnnnnnnnnnnnnnnnnnnnnnnnnnnnnnnnnnnnnnnnnnnnnnnnnnnnnnnnnnnnnnnnnnnnnnnnnnnnnnnnnnnnnnnnnnnnnnnnnnnnnnnnnnnnnnnnnnnnnnnnnnnnnnnnnnnnnnnnnnnnnnnnnnnnnnnnnnnnnnnnnnnnnnnnnnnnnnnnnnnnnnnnnnnnnnnnnnnnnnnnnnnnnnnnnnnnnnnnnnnnnnnnnnnnnnnnnnnnnnnnnnnnnnnnnnnnnnnnnnnnnnnnnnnnnnnnnnnnnnnnnnnnnnnnnnnnnnnnnnnnnnnnnnnnnnnnnnnnnnnnnnnnnnnnnnnnnnnnnnnnnnnnnnnnnnnnnnnnnnnnnnnnnnnnnnnnnnnnnnnnnnnnnnnnnnnnnnnnnnnnnnnnnnnnnnnnnnnnnnnnnnnnnnnnnnnnnnnnnnnnnnnnnnnnnnnnnnnnnnnnnnnnnnnnnnnnnnnnnnnnnnnnnnnnnnnnnnnnnnnnnnnnnnnnnnnnnnnnnnnnnnnnnnnnnnnnnnnnnnnnnnnnnnnnnnnnnnnnnnnnnnnnnnnnnnnnnnnnnnnnnnnnnnnnnnnnnnnnnnnnnnnnnnnnnnnnnnnnnnnnnnnnnnnnnnnnnnnnnnnnnnnnnnnnnnnnnnnnnnnnnnnnnnnnnnnnnnnnnnnnnnnnnnnnnnnnnnnnnnnnnnnnnnnnnnnnnnnnnnnnnnnnnnnnnnnnnnnnnnnnnnnnnnnnnnnnnnnnnnnnnnnnnnnnnnnnnnnnnnnnnnnnnnnnnnnnnnnnnnnnnnnnnnnnnnnnnnnnnnnnnnnnnnnnnnnnnnnnnnnnnnnnnnnnnnnnnnnnnnnnnnnnnnnnnnnnnnnnnnnnnnnnnnnnnnnnnnnnnnnnnnnnnnnnnnnnnnnnnnnnnnnnnnnnnnnnnnnnnnnnnnnnnnnnnnnnnnnnnnnnnnnnnnnnnnnnnnnnnnnnnnnnnnnnnnnnnnnnnnnnnnnnnnnnnnnnnnnnnnnnnnnnnnnnnnnnnnnnnnnnnnnnnnnnnnnnnnnnnnnnnnnnnnnnnnnnnnnnnnnnnnnnnnnnnnnnnnnnnnnnnnnnnnnnnnnnnnnnnnnnnnnnnnnnnnnnnnnnnnnnnnnnnnnnnnnnnnnnnnnnnnnnnnnnnnnnnnnnnnnnnnnnnnnnnnnnnnnnnnnnnnnnnnnnnnnnnnnnnnnnnnnnnnnnnnnnnnnnnnnnnnnnnnnnnnnnnnnnnnnnnnnnnnnnnnnnnnnnnnnnnnnnnnnnnnnnnnnnnnnnnnnnnnnnnnnnnnnnnnnnnnnnnnnnnnnnnnnnnnnnnnnnnnnnnnnnnnnnnnnnnnnnnnnnnnnnnnnnnnnnnnnnnnnnnnnnnnnnnnnnnnnnnnnnnnnnnnnnnnnnnnnnnnnnnnnnnnnnnnnnnnnnnnnnnnnnnnnnnnnnnnnnnnnnnnnnnnnnnnnnnnnnnnnnnnnnnnnnnnnnnnnnnnnnnnnnnnnnnnnnnnnnnnnnnnnnnnnnnnnnnnnnnnnnnnnnnnnnnnnnnnnnnnnnnnnnnnnnnnnnnnnnnnnnnnnnnnnnnnnnnnnnnnnnnnnnnnnnnnnnnnnnnnnnnnnnnnnnnnnnnnnnnnnnnnnnnnnnnnnnnnnnnnnnnnnnnnnnnnnnnnnnnnnnnnnnnnnnnnnnnnnnnnnnnnnnnnnnnnnnnnnnnnnnnnnnnnnnnnnnnnnnnnnnnnnnnnnnnnnnnnnnnnnnnnnnnnnnnnnnnnnnnnnnnnnnnnnnnnnnnnnnnnnnnnnnnnnnnnnnnnnnnnnnnnnnnnnnnnnnnnnnnnnnnnnnnnnnnnnnnnnnnnnnnnnnnnnnnnnnnnnnnnnnnnnnnnnnnnnnnnnnnnnnnnnnnnnnnnnnnnnnnnnnnnnnnnnnnnnnnnnnnnnnnnnnnnnnnnnnnnnnnnnnnnnnnnnnnnnnnnnnnnnnnnnnnnnnnnnnnnnnnnnnnnnnnnnnnnnnnnnnnnnnnnnnnnnnnnnnnnnnnnnnnnnnnnnnnnnnnnnnnnnnnnnnnnnnnnnnnnnnnnnnnnnnnnnnnnnnnnnnnnnnnnnnnnnnnnnnnnnnnnnnnnnnnnnnnnnnnnnnnnnnnnnnnnnnnnnnnnnnnnnnnnnnnnnnnnnnnnnnnnnnnnnnnnnnnnnnnnnnnnnnnnnnnnnnnnnnnnnnnnnnnnnnnnnnnnnnnnnnnnnnnnnnnnnnnnnnnnnnnnnnnnnnnnnnnnnnnnnnnnnnnnnnnnnnnnnnnnnnnnnnnnnnnnnnnnnnnnnnnnnnnnnnnnnnnnnnnnnnnnnnnnnnnnnnnnnnnnnnnnnnnnnnnnnnnnnnnnnnnnnnnnnnnnnnnnnnnnnnnnnnnnnnnnnnnnnnnnnnnnnnnnnnnnnnnnnnnnnnnnnnnnnnnnnnnnnnnnnnnnnnnnnnnnnnnnnnnnnnnnnnnnnnnnnnnnnnnnnnnnnnnnnnnnnnnnnnnnnnnnnnnnnnnnnnnnnnnnnnnnnnnnnnnnnnnnnnnnnnnnnnnnnnnnnnnnnnnnnnnnnnnnnnnnnnnnnnnnnnnnnnnnnnnnnnnnnnnnnnnnnnnnnnnnnnnnnnnnnnnnnnnnnnnnnnnnnnnnnnnnnnnnnnnnnnnnnnnnnnnnnnnnnnnnnnnnnnnnnnnnnnnnnnnnnnnnnnnnnnnnnnnnnnnnnnnnnnnnnnnnnnnnnnnnnnnnnnnnnnnnnnnnnnnnnnnnnnnnnnnnnnnnnnnnnnnnnnnnnnnnnnnnnnnnnnnnnnnnnnnnnnnnnnnnnnnnnnnnnnnnnnnnnnnnnnnnnnnnnnnnnnnnnnnnnnnnnnnnnnnnnnnnnnnnnnnnnnnnnnnnnnnnnnnnnnnnnnnnnnnnnnnnnnnnnnnnnnnnnnnnnnnnnnnnnnnnnnnnnnnnnnnnnnnnnnnnnnnnnnnnnnnnnnnnnnnnnnnnnnnnnnnnnnnnnnnnnnnnnnnnnnnnnnnnnnnnnnnnnnnnnnnnnnnnnnnnnnnnnnnnnnnnnnnnnnnnnnnnnnnnnnnnnnnnnnnnnnnnnnnnnnnnnnnnnnnnnnnnnnnnnnnnnnnnnnnnnnnnnnnnnnnnnnnnnnnnnnnnnnnnnnnnnnnnnnnnnnnnnnnnnnnnnnnnnnnnnnnnnnnnnnnnnnnnnnnnnnnnnnnnnnnnnnnnnnnnnnnnnnnnnnnnnnnnnnnnnnnnnnnnnnnnnnnnnnnnnnnnnnnnnnnnnnnnnnnnnnnnnnnnnnnnnnnnnnnnnnnnnnnnnnnnnnnnnnnnnnnnnnnnnnnnnnnnnnnnnnnnnnnnnnnnnnnnnnnnnnnnnnnnnnnnnnnnnnnnnnnnnnnnnnnnnnnnnnnnnnnnnnnnnnnnnnnnnnnnnnnnnnnnnnnnnnnnnnnnnnnnnnnnnnnnnnnnnnnnnnnnnnnnnnnnnnnnnnnnnnnnnnnnnnnnnnnnnnnnnnnnnnnnnnnnnnnnnnnnnnnnnnnnnnnnnnnnnnnnnnnnnnnnnnnnnnnnnnnnnnnnnnnnnnnnnnnnnnnnnnnnnnnnnnnnnnnnnnnnnnnnnnnnnnnnnnnnnnnnnnnnnnnnnnnnnnnnnnnnnnnnnnnnnnnnnnnnnnnnnnnnnnnnnnnnnnnnnnnnnnnnnnnnnnnnnnnnnnnnnnnnnnnnnnnnnnnnnnnnnnnnnnnnnnnnnnnnnnnnnnnnnnnnnnnnnnnnnnnnnnnnnnnnnnnnnnnnnnnnnnnnnnnnnnnnnnnnnnnnnnnnnnnnnnnnnnnnnnnnnnnnnnnnnnnnnnnnnnnnnnnnnnnnnnnnnnnnnnnnnnnnnnnnnnnnnnnnnnnnnnnnnnnnnnnnnnnnnnnnnnnnnnnnnnnnnnnnnnnnnnnnnnnnnnnnnnnnnnnnnnnnnnnnnnnnnnnnnnnnnnnnnnnnnnnnnnnnnnnnnnnnnnnnnnnnnnnnnnnnnnnnnnnnnnnnnnnnnnnnnnnnnnnnnnnnnnnnnnnnnnnnnnnnnnnnnnnnnnnnnnnnnnnnnnnnnnnnnnnnnnnnnnnnnnnnnnnnnnnnnnnnnnnnnnnnnnnnnnnnnnnnnnnnnnnnnnnnnnnnnnnnnnnnnnnnnnnnnnnnnnnnnnnnnnnnnnnnnnnnnnnnnnnnnnnnnnnnnnnnnnnnnnnnnnnnnnnnnnnnnnnnnnnnnnnnnnnnnnnnnnnnnnnnnnnnnnnnnnnnnnnnnnnnnnnnnnnnnnnnnnnnnnnnnnnnnnnnnnnnnnnnnnnnnnnnnnnnnnnnnnnnnnnnnnnnnnnnnnnnnnnnnnnnnnnnnnnnnnnnnnnnnnnnnnnnnnnnnnnnnnnnnnnnnnnnnnnnnnnnnnnnnnnnnnnnnnnnnnnnnnnnnnnnnnnnnnnnnnnnnnnnnnnnnnnnnnnnnnnnnnnnnnnnnnnnnnnnnnnnnnnnnnnnnnnnnnnnnnnnnnnnnnnnnnnnnnnnnnnnnnnnnnnnnnnnnnnnnnnnnnnnnnnnnnnnnnnnnnnnnnnnnnnnnnnnnnnnnnnnnnnnnnnnnnnnnnnnnnnnnnnnnnnnnnnnnnnnnnnnnnnnnnnnnnnnnnnnnnnnnnnnnnnnnnnnnnnnnnnnnnnnnnnnnnnnnnnnnnnnnnnnnnnnnnnnnnnnnnnnnnnnnnnnnnnnnnnnnnnnnnnnnnnnnnnnnnnnnnnnnnnnnnnnnnnnnnnnnnnnnnnnnnnnnnnnnnnnnnnnnnnnnnnnnnnnnnnnnnnnnnnnnnnnnnnnnnnnnnnnnnnnnnnnnnnnnnnnnnnnnnnnnnnnnnnnnnnnnnnnnnnnnnnnnnnnnnnnnnnnnnnnnnnnnnnnnnnnnnnnnnnnnnnnnnnnnnnnnnnnnnnnnnnnnnnnnnnnnnnnnnnnnnnnnnnnnnnnnnnnnnnnnnnnnnnnnnnnnnnnnnnnnnnnnnnnnnnnnnnnnnnnnnnnnnnnnnnnnnnnnnnnnnnnnnnnnnnnnnnnnnnnnnnnnnnnnnnnnnnnnnnnnnnnnnnnnnnnnnnnnnnnnnnnnnnnnnnnnnnnnnnnnnnnnnnnnnnnnnnnnnnnnnnnnnnnnnnnnnnnnnnnnnnnnnnnnnnnnnnnnnnnnnnnnnnnnnnnnnnnnnnnnnnnnnnnnnnnnnnnnnnnnnnnnnnnnnnnnnnnnnnnnnnnnnnnnnnnnnnnnnnnnnnnnnnnnnnnnnnnnnnnnnnnnnnnnnnnnnnnnnnnnnnnnnnnnnnnnnnnnnnnnnnnnnnnnnnnnnnnnnnnnnnnnnnnnnnnnnnnnnnnnnnnnnnnnnnnnnnnnnnnnnnnnnnnnnnnnnnnnnnnnnnnnnnnnnnnnnnnnnnnnnnnnnnnnnnnnnnnnnnnnnnnnnnnnnnnnnnnnnnnnnnnnnnnnnnnnnnnnnnnnnnnnnnnnnnnnnnnnnnnnnnnnnnnnnnnnnnnnnnnnnnnnnnnnnnnnnnnnnnnnnnnnnnnnnnnnnnnnnnnnnnnnnnnnnnnnnnnnnnnnnnnnnnnnnnnnnnnnnnnnnnnnnnnnnnnnnnnnnnnnnnnnnnnnnnnnnnnnnnnnnnnnnnnnnnnnnnnnnnnnnnnnnnnnnnnnnnnnnnnnnnnnnnnnnnnnnnnnnnnnnnnnnnnnnnnnnnnnnnnnnnnnnnnnnnnnnnnnnnnnnnnnnnnnnnnnnnnnnnnnnnnnnnnnnnnnnnnnnnnnnnnnnnnnnnnnnnnnnnnnnnnnnnnnnnnnnnnnnnnnnnnnnnnnnnnnnnnnnnnnnnnnnnnnnnnnnnnnnnnnnnnnnnnnnnnnnnnnnnnnnnnnnnnnnnnnnnnnnnnnnnnnnnnnnnnnnnnnnnnnnnnnnnnnnnnnnnnnnnnnnnnnnnnnnnnnnnnnnnnnnnnnnnnnnnnnnnnnnnnnnnnnnnnnnnnnnnnnnnnnnnnnnnnnnnnnnnnnnnnnnnnnnnnnnnnnnnnnnnnnnnnnnnnnnnnnnnnnnnnnnnnnnnnnnnnnnnnnnnnnnnnnnnnnnnnnnnnnnnnnnnnnnnnnnnnnnnnnnnnnnnnnnnnnnnnnnnnnnnnnnnnnnnnnnnnnnnnnnnnnnnnnnnnnnnnnnnnnnnnnnnnnnnnnnnnnnnnnnnnnnnnnnnnnnnnnnnnnnnnnnnnnnnnnnnnnnnnnnnnnnnnnnnnnnnnnnnnnnnnnnnnnnnnnnnnnnnnnnnnnnnnnnnnnnnnnnnnnnnnnnnnnnnnnnnnnnnnnnnnnnnnnnnnnnnnnnnnnnnnnnnnnnnnnnnnnnnnnnnnnnnnnnnnnnnnnnnnnnnnnnnnnnnnnnnnnnnnnnnnnnnnnnnnnnnnnnnnnnnnnnnnnnnnnnnnnnnnnnnnnnnnnnnnnnnnnnnnnnnnnnnnnnnnnnnnnnnnnnnnnnnnnnnnnnnnnnnnnnnnnnnnnnnnnnnnnnnnnnnnnnnnnnnnnnnnnnnnnnnnnnnnnnnnnnnnnnnnnnnnnnnnnnnnnnnnnnnnnnnnnnnnnnnnnnnnnnnnnnnnnnnnnnnnnnnnnnnnnnnnnnnnnnnnnnnnnnnnnnnnnnnnnnnnnnnnnnnnnnnnnnnnnnnnnnnnnnnnnnnnnnnnnnnnnnnnnnnnnnnnnnnnnnnnnnnnnnnnnnnnnnnnnnnnnnnnnnnnnnnnnnnnnnnnnnnnnnnnnnnnnnnnnnnnnnnnnnnnnnnnnnnnnnnnnnnnnnnnnnnnnnnnnnnnnnnnnnnnnnnnnnnnnnnnnnnnnnnnnnnnnnnnnnnnnnnnnnnnnnnnnnnnnnnnnnnnnnnnnnnnnnnnnnnnnnnnnnnnnnnnnnnnnnnnnnnnnnnnnnnnnnnnnnnnnnnnnnnnnnnnnnnnnnnnnnnnnnnnnnnnnnnnnnnnnnnnnnnnnnnnnnnnnnnnnnnnnnnnnnnnnnnnnnnnnnnnnnnnnnnnnnnnnnnnnnnnnnnnnnnnnnnnnnnnnnnnnnnnnnnnnnnnnnnnnnnnnnnnnnnnnnnnnnnnnnnnnnnnnnnnnnnnnnnnnnnnnnnnnnnnnnnnnnnnnnnnnnnnnnnnnnnnnnnnnnnnnnnnnnnnnnnnnnnnnnnnnnnnnnnnnnnnnnnnnnnnnnnnnnnnnnnnnnnnnnnnnnnnnnnnnnnnnnnnnnnnnnnnnnnnnnnnnnnnnnnnnnnnnnnnnnnnnnnnnnnnnnnnnnnnnnnnnnnnnnnnnnnnnnnnnnnnnnnnnnnnnnnnnnnnnnnnnnnnnnnnnnnnnnnnnnnnnnnnnnnnnnnnnnnnnnnnnnnnnnnnnnnnnnnnnnnnnnnnnnnnnnnnnnnnnnnnnnnnnnnnnnnnnnnnnnnnnnnnnnnnnnnnnnnnnnnnnnnnnnnnnnnnnnnnnnnnnnnnnnnnnnnnnnnnnnnnnnnnnnnnnnnnnnnnnnnnnnnnnnnnnnnnnnnnnnnnnnnnnnnnnnnnnnnnnnnnnnnnnnnnnnnnnnnnnnnnnnnnnnnnnnnnnnnnnnnnnnnnnnnnnnnnnnnnnnnnnnnnnnnnnnnnnnnnnnnnnnnnnnnnnnnnnnnnnnnnnnnnnnnnnnnnnnnnnnnnnnnnnnnnnnnnnnnnnnnnnnnnnnnnnnnnnnnnnnnnnnnnnnnnnnnnnnnnnnnnnnnnnnnnnnnnnnnnnnnnnnnnnnnnnnnnnnnnnnnnnnnnnnnnnnnnnnnnnnnnnnnnnnnnnnnnnnnnnnnnnnnnnnnnnnnnnnnnnnnnnnnnnnnnnnnnnnnnnnnnnnnnnnnnnnnnnnnnnnnnnnnnnnnnnnnnnnnnnnnnnnnnnnnnnnnnnnnnnnnnnnnnnnnnnnnnnnnnnnnnnnnnnnnnnnnnnnnnnnnnnnnnnnnnnnnnnnnnnnnnnnnnnnnnnnnnnnnnnnnnnnnnnnnnnnnnnnnnnnnnnnnnnnnnnnnnnnnnnnnnnnnnnnnnnnnnnnnnnnnnnnnnnnnnnnnnnnnnnnnnnnnnnnnnnnnnnnnnnnnnnnnnnnnnnnnnnnnnnnnnnnnnnnnnnnnnnnnnnnnnnnnnnnnnnnnnnnnnnnnnnnnnnnnnnnnnnnnnnnnnnnnnnnnnnnnnnnnnnnnnnnnnnnnnnnnnnnnnnnnnnnnnnnnnnnnnnnnnnnnnnnnnnnnnnnnnnnnnnnnnnnnnnnnnnnnnnnnnnnnnnnnnnnnnnnnnnnnnnnnnnnnnnnnnnnnnnnnnnnnnnnnnnnnnnnnnnnnnnnnnnnnnnnnnnnnnnnnnnnnnnnnnnnnnnnnnnnnnnnnnnnnnnnnnnnnnnnnnnnnnnnnnnnnnnnnnnnnnnnnnnnnnnnnnnnnnnnnnnnnnnnnnnnnnnnnnnnnnnnnnnnnnnnnnnnnnnnnnnnnnnnnnnnnnnnnnnnnnnnnnnnnnnnnnnnnnnnnnnnnnnnnnnnnnnnnnnnnnnnnnnnnnnnnnnnnnnnnnnnnnnnnnnnnnnnnnnnnnnnnnnnnnnnnnnnnnnnnnnnnnnnnnnnnnnnnnnnnnnnnnnnnnnnnnnnnnnnnnnnnnnnnnnnnnnnnnnnnnnnnnnnnnnnnnnnnnnnnnnnnnnnnnnnnnnnnnnnnnnnnnnnnnnnnnnnnnnnnnnnnnnnnnnnnnnnnnnnnnnnnnnnnnnnnnnnnnnnnnnnnnnnnnnnnnnnnnnnnnnnnnnnnnnnnnnnnnnnnnnnnnnnnnnnnnnnnnnnnnnnnnnnnnnnnnnnnnnnnnnnnnnnnnnnnnnnnnnnnnnnnnnnnnnnnnnnnnnnnnnnnnnnnnnnnnnnnnnnnnnnnnnnnnnnnnnnnnnnnnnnnnnnnnnnnnnnnnnnnnnnnnnnnnnnnnnnnnnnnnnnnnnnnnnnnnnnnnnnnnnnnnnnnnnnnnnnnnnnnnnnnnnnnnnnnnnnnnnnnnnnnnnnnnnnnnnnnnnnnnnnnnnnnnnnnnnnnnnnnnnnnnnnnnnnnnnnnnnnnnnnnnnnnnnnnnnnnnnnnnnnnnnnnnnnnnnnnnnnnnnnnnnnnnnnnnnnnnnnnnnnnnnnnnnnnnnnnnnnnnnnnnnnnnnnnnnnnnnnnnnnnnnnnnnnnnnnnnnnnnnnnnnnnnnnnnnnnnnnnnnnnnnnnnnnnnnnnnnnnnnnnnnnnnnnnnnnnnnnnnnnnnnnnnnnnnnnnnnnnnnnnnnnnnnnnnnnnnnnnnnnnnnnnnnnnnnnnnnnnnnnnnnnnnnnnnnnnnnnnnnnnnnnnnnnnnnnnnnnnnnnnnnnnnnnnnnnnnnnnnnnnnnnnnnnnnnnnnnnnnnnnnnnnnnnnnnnnnnnnnnnnnnnnnnnnnnnnnnnnnnnnnnnnnnnnnnnnnnnnnnnnnnnnnnnnnnnnnnnnnnnnnnnnnnnnnnnnnnnnnnnnnnnnnnnnnnnnnnnnnnnnnnnnnnnnnnnnnnnnnnnnnnnnnnnnnnnnnnnnnnnnnnnnnnnnnnnnnnnnnnnnnnnnnnnnnnnnnnnnnnnnnnnnnnnnnnnnnnnnnnnnnnnnnnnnnnnnnnnnnnnnnnnnnnnnnnnnnnnnnnnnnnnnnnnnnnnnnnnnnnnnnnnnnnnnnnnnnnnnnnnnnnnnnnnnnnnnnnnnnnnnnnnnnnnnnnnnnnnnnnnnnnnnnnnnnnnnnnnnnnnnnnnnnnnnnnnnnnnnnnnnnnnnnnnnnnnnnnnnnnnnnnnnnnnnnnnnnnnnnnnnnnnnnnnnnnnnnnnnnnnnnnnnnnnnnnnnnnnnnnnnnnnnnnnnnnnnnnnnnnnnnnnnnnnnnnnnnnnnnnnnnnnnnnnnnnnnnnnnnnnnnnnnnnnnnnnnnnnnnnnnnnnnnnnnnnnnnnnnnnnnnnnnnnnnnnnnnnnnnnnnnnnnnnnnnnnnnnnnnnnnnnnnnnnnnnnnnnnnnnnnnnnnnnnnnnnnnnnnnnnnnnnnnnnnnnnnnnnnnnnnnnnnnnnnnnnnnnnnnnnnnnnnnnnnnnnnnnnnnnnnnnnnnnnnnnnnnnnnnnnnnnnnnnnnnnnnnnnnnnnnnnnnnnnnnnnnnnnnnnnnnnnnnnnnnnnnnnnnnnnnnnnnnnnnnnnnnnnnnnnnnnnnnnnnnnnnnnnnnnnnnnnnnnnnnnnnnnnnnnnnnnnnnnnnnnnnnnnnnnnnnnnnnnnnnnnnnnnnnnnnnnnnnnnnnnnnnnnnnnnnnnnnnnnnnnnnnnnnnnnnnnnnnnnnnnnnnnnnnnnnnnnnnnnnnnnnnnnnnnnnnnnnnnnnnnnnnnnnnnnnnnnnnnnnnnnnnnnnnnnnnnnnnnnnnnnnnnnnnnnnnnnnnnnnnnnnnnnnnnnnnnnnnnnnnnnnnnnnnnnnnnnnnnnnnnnnnnnnnnnnnnnnnnnnnnnnnnnnnnnnnnnnnnnnnnnnnnnnnnnnnnnnnnnnnnnnnnnnnnnnnnnnnnnnnnnnnnnnnnnnnnnnnnnnnnnnnnnnnnnnnnnnnnnnnnnnnnnnnnnnnnnnnnnnnnnnnnnnnnnnnnnnnnnnnnnnnnnnnnnnnnnnnnnnnnnnnnnnnnnnnnnnnnnnnnnnnnnnnnnnnnnnnnnnnnnnnnnnnnnnnnnnnnnnnnnnnnnnnnnnnnnnnnnnnnnnnnnnnnnnnnnnnnnnnnnnnnnnnnnnnnnnnnnnnnnnnnnnnnnnnnnnnnnnnnnnnnnnnnnnnnnnnnnnnnnnnnnnnnnnnnnnnnnnnnnnnnnnnnnnnnnnnnnnnnnnnnnnnnnnnnnnnnnnnnnnnnnnnnnnnnnnnnnnnnnnnnnnnnnnnnnnnnnnnnnnnnnnnnnnnnnnnnnnnnnnnnnnnnnnnnnnnnnnnnnnnnnnnnnnnnnnnnnnnnnnnnnnnnnnnnnnnnnnnnnnnnnnnnnnnnnnnnnnnnnnnnnnnnnnnnnnnnnnnnnnnnnnnnnnnnnnnnnnnnnnnnnnnnnnnnnnnnnnnnnnnnnnnnnnnnnnnnnnnnnnnnnnnnnnnnnnnnnnnnnnnnnnnnnnnnnnnnnnnnnnnnnnnnnnnnnnnnnnnnnnnnnnnnnnnnnnnnnnnnnnnnnnnnnnnnnnnnnnnnnnnnnnnnnnnnnnnnnnnnnnnnnnnnnnnnnnnnnnnnnnnnnnnnnnnnnnnnnnnnnnnnnnnnnnnnnnnnnnnnnnnnnnnnnnnnnnnnnnnnnnnnnnnnnnnnnnnnnnnnnnnnnnnnnnnnnnnnnnnnnnnnnnnnnnnnnnnnnnnnnnnnnnnnnnnnnnnnnnnnnnnnnnnnnnnnnnnnnnnnnnnnnnnnnnnnnnnnnnnnnnnnnnnnnnnnnnnnnnnnnnnnnnnnnnnnnnnnnnnnnnnnnnnnnnnnnnnnnnnnnnnnnnnnnnnnnnnnnnnnnnnnnnnnnnnnnnnnnnnnnnnnnnnnnnnnnnnnnnnnnnnnnnnnnnnnnnnnnnnnnnnnnnnnnnnnnnnnnnnnnnnnnnnnnnnnnnnnnnnnnnnnnnnnnnnnnnnnnnnnnnnnnnnnnnnnnnnnnnnnnnnnnnnnnnnnnnnnnnnnnnnnnnnnnnnnnnnnnnnnnnnnnnnnnnnnnnnnnnnnnnnnnnnnnnnnnnnnnnnnnnnnnnnnnnnnnnnnnnnnnnnnnnnnnnnnnnnnnnnnnnnnnnnnnnnnnnnnnnnnnnnnnnnnnnnnnnnnnnnnnnnnnnnnnnnnnnnnnnnnnnnnnnnnnnnnnnnnnnnnnnnnnnnnnnnnnnnnnnnnnnnnnnnnnnnnnnnnnnnnnnnnnnnnnnnnnnnnnnnnnnnnnnnnnnnnnnnnnnnnnnnnnnnnnnnnnnnnnnnnnnnnnnnnnnnnnnnnnnnnnnnnnnnnnnnnnnnnnnnnnnnnnnnnnnnnnnnnnnnnnnnnnnnnnnnnnnnnnnnnnnnnnnnnnnnnnnnnnnnnnnnnnnnnnnnnnnnnnnnnnnnnnnnnnnnnnnnnnnnnnnnnnnnnnnnnnnnnnnnnnnnnnnnnnnnnnnnnnnnnnnnnnnnnnnnnnnnnnnnnnnnnnnnnnnnnnnnnnnnnnnnnnnnnnnnnnnnnnnnnnnnnnnnnnnnnnnnnnnnnnnnnnnnnnnnnnnnnnnnnnnnnnnnnnnnnnnnnnnnnnnnnnnnnnnnnnnnnnnnnnnnnnnnnnnnnnnnnnnnnnnnnnnnnnnnnnnnnnnnnnnnnnnnnnnnnnnnnnnnnnnnnnnnnnnnnnnnnnnnnnnnnnnnnnnnnnnnnnnnnnnnnnnnnnnnnnnnnnnnnnnnnnnnnnnnnnnnnnnnnnnnnnnnnnnnnnnnnnnnnnnnnnnnnnnnnnnnnnnnnnnnnnnnnnnnnnnnnnnnnnnnnnnnnnnnnnnnnnnnnnnnnnnnnnnnnnnnnnnnnnnnnnnnnnnnnnnnnnnnnnnnnnnnnnnnnnnnnnnnnnnnnnnnnnnnnnnnnnnnnnnnnnnnnnnnnnnnnnnnnnnnnnnnnnnnnnnnnnnnnnnnnnnnnnnnnnnnnnnnnnnnnnnnnnnnnnnnnnnnnnnnnnnnnnnnnnnnnnnnnnnnnnnnnnnnnnnnnnnnnnnnnnnnnnnnnnnnnnnnnnnnnnnnnnnnnnnnnnnnnnnnnnnnnnnnnnnnnnnnnnnnnnnnnnnnnnnnnnnnnnnnnnnnnnnnnnnnnnnnnnnnnnnnnnnnnnnnnnnnnnnnnnnnnnnnnnnnnnnnnnnnnnnnnnnnnnnnnnnnnnnnnnnnnnnnnnnnnnnnnnnnnnnnnnnnnnnnnnnnnnnnnnnnnnnnnnnnnnnnnnnnnnnnnnnnnnnnnnnnnnnnnnnnnnnnnnnnnnnnnnnnnnnnnnnnnnnnnnnnnnnnnnnnnnnnnnnnnnnnnnnnnnnnnnnnnnnnnnnnnnnnnnnnnnnnnnnnnnnnnnnnnnnnnnnnnnnnnnnnnnnnnnnnnnnnnnnnnnnnnnnnnnnnnnnnnnnnnnnnnnnnnnnnnnnnnnnnnnnnnnnnnnnnnnnnnnnnnnnnnnnnnnnnnnnnnnnnnnnnnnnnnnnnnnnnnnnnnnnnnnnnnnnnnnnnnnnnnnnnnnnnnnnnnnnnnnnnnnnnnnnnnnnnnnnnnnnnnnnnnnnnnnnnnnnnnnnnnnnnnnnnnnnnnnnnnnnnnnnnnnnnnnnnnnnnnnnnnnnnnnnnnnnnnnnnnnnnnnnnnnnnnnnnnnnnnnnnnnnnnnnnnnnnnnnnnnnnnnnnnnnnnnnnnnnnnnnnnnnnnnnnnnnnnnnnnnnnnnnnnnnnnnnnnnnnnnnnnnnnnnnnnnnnnnnnnnnnnnnnnnnnnnnnnnnnnnnnnnnnnnnnnnnnnnnnnnnnnnnnnnnnnnnnnnnnnnnnnnnnnnnnnnnnnnnnnnnnnnnnnnnnnnnnnnnnnnnnnnnnnnnnnnnnnnnnnnnnnnnnnnnnnnnnnnnnnnnnnnnnnnnnnnnnnnnnnnnnnnnnnnnnnnnnnnnnnnnnnnnnnnnnnnnnnnnnnnnnnnnnnnnnnnnnnnnnnnnnnnnnnnnnnnnnnnnnnnnnnnnnnnnnnnnnnnnnnnnnnnnnnnnnnnnnnnnnnnnnnnnnnnnnnnnnnnnnnnnnnnnnnnnnnnnnnnnnnnnnnnnnnnnnnnnnnnnnnnnnnnnnnnnnnnnnnnnnnnnnnnnnnnnnnnnnnnnnnnnnnnnnnnnnnnnnnnnnnnnnnnnnnnnnnnnnnnnnnnnnnnnnnnnnnnnnnnnnnnnnnnnnnnnnnnnnnnnnnnnnnnnnnnnnnnnnnnnnnnnnnnnnnnnnnnnnnnnnnnnnnnnnnnnnnnnnnnnnnnnnnnnnnnnnnnnnnnnnnnnnnnnnnnnnnnnnnnnnnnnnnnnnnnnnnnnnnnnnnnnnnnnnnnnnnnnnnnnnnnnnnnnnnnnnnnnnnnnnnnnnnnnnnnnnnnnnnnnnnnnnnnnnnnnnnnnnnnnnnnnnnnnnnnnnnnnnnnnnnnnnnnnnnnnnnnnnnnnnnnnnnnnnnnnnnnnnnnnnnnnnnnnnnnnnnnnnnnnnnnnnnnnnnnnnnnnnnnnnnnnnnnnnnnnnnnnnnnnnnnnnnnnnnnnnnnnnnnnnnnnnnnnnnnnnnnnnnnnnnnnnnnnnnnnnnnnnnnnnnnnnnnnnnnnnnnnnnnnnnnnnnnnnnnnnnnnnnnnnnnnnnnnnnnnnnnnnnnnnnnnnnnnnnnnnnnnnnnnnnnnnnnnnnnnnnnnnnnnnnnnnnnnnnnnnnnnnnnnnnnnnnnnnnnnnnnnnnnnnnnnnnnnnnnnnnnnnnnnnnnnnnnnnnnnnnnnnnnnnnnnnnnnnnnnnnnnnnnnnnnnnnnnnnnnnnnnnnnnnnnnnnnnnnnnnnnnnnnnnnnnnnnnnnnnnnnnnnnnnnnnnnnnnnnnnnnnnnnnnnnnnnnnnnnnnnnnnnnnnnnnnnnnnnnnnnnnnnnnnnnnnnnnnnnnnnnnnnnnnnnnnnnnnnnnnnnnnnnnnnnnnnnnnnnnnnnnnnnnnnnnnnnnnnnnnnnnnnnnnnnnnnnnnnnnnnnnnnnnnnnnnnnnnnnnnnnnnnnnnnnnnnnnnnnnnnnnnnnnnnnnnnnnnnnnnnnnnnnnnnnnnnnnnnnnnnnnnnnnnnnnnnnnnnnnnnnnnnnnnnnnnnnnnnnnnnnnnnnnnnnnnnnnnnnnnnnnnnnnnnnnnnnnnnnnnnnnnnnnnnnnnnnnnnnnnnnnnnnnnnnnnnnnnnnnnnnnnnnnnnnnnnnnnnnnnnnnnnnnnnnnnnnnnnnnnnnnnnnnnnnnnnnnnnnnnnnnnnnnnnnnnnnnnnnnnnnnnnnnnnnnnnnnnnnnnnnnnnnnnnnnnnnnnnnnnnnnnnnnnnnnnnnnnnnnnnnnnnnnnnnnnnnnnnnnnnnnnnnnnnnnnnnnnnnnnnnnnnnnnnnnnnnnnnnnnnnnnnnnnnnnnnnnnnnnnnnnnnnnnnnnnnnnnnnnnnnnnnnnnnnnnnnnnnnnnnnnnnnnnnnnnnnnnnnnnnnnnnnnnnnnnnnnnnnnnnnnnnnnnnnnnnnnnnnnnnnnnnnnnnnnnnnnnnnnnnnnnnnnnnnnnnnnnnnnnnnnnnnnnnnnnnnnnnnnnnnnnnnnnnnnnnnnnnnnnnnnnnnnnnnnnnnnnnnnnnnnnnnnnnnnnnnnnnnnnnnnnnnnnnnnnnnnnnnnnnnnnnnnnnnnnnnnnnnnnnnnnnnnnnnnnnnnnnnnnnnnnnnnnnnnnnnnnnnnnnnnnnnnnnnnnnnnnnnnnnnnnnnnnnnnnnnnnnnnnnnnnnnnnnnnnnnnnnnnnnnnnnnnnnnnnnnnnnnnnnnnnnnnnnnnnnnnnnnnnnnnnnnnnnnnnnnnnnnnnnnnnnnnnnnnnnnnnnnnnnnnnnnnnnnnnnnnnnnnnnnnnnnnnnnnnnnnnnnnnnnnnnnnnnnnnnnnnnnnnnnnnnnnnnnnnnnnnnnnnnnnnnnnnnnnnnnnnnnnnnnnnnnnnnnnnnnnnnnnnnnnnnnnnnnnnnnnnnnnnnnnnnnnnnnnnnnnnnnnnnnnnnnnnnnnnnnnnnnnnnnnnnnnnnnnnnnnnnnnnnnnnnnnnnnnnnnnnnnnnnnnnnnnnnnnnnnnnnnnnnnnnnnnnnnnnnnnnnnnnnnnnnnnnnnnnnnnnnnnnnnnnnnnnnnnnnnnnnnnnnnnnnnnnnnnnnnnnnnnnnnnnnnnnnnnnnnnnnnnnnnnnnnnnnnnnnnnnnnnnnnnnnnnnnnnnnnnnnnnnnnnnnnnnnnnnnnnnnnnnnnnnnnnnnnnnnnnnnnnnnnnnnnnnnnnnnnnnnnnnnnnnnnnnnnnnnnnnnnnnnnnnnnnnnnnnnnnnnnnnnnnnnnnnnnnnnnnnnnnnnnnnnnnnnnnnnnnnnnnnnnnnnnnnnnnnnnnnnnnnnnnnnnnnnnnnnnnnnnnnnnnnnnnnnnnnnnnnnnnnnnnnnnnnnnnnnnnnnnnnnnnnnnnnnnnnnnnnnnnnnnnnnnnnnnnnnnnnnnnnnnnnnnnnnnnnnnnnnnnnnnnnnnnnnnnnnnnnnnnnnnnnnnnnnnnnnnnnnnnnnnnnnnnnnnnnnnnnnnnnnnnnnnnnnnnnnnnnnnnnnnnnnnnnnnnnnnnnnnnnnnnnnnnnnnnnnnnnnnnnnnnnnnnnnnnnnnnnnnnnnnnnnnnnnnnnnnnnnnnnnnnnnnnnnnnnnnnnnnnnnnnnnnnnnnnnnnnnnnnnnnnnnnnnnnnnnnnnnnnnnnnnnnnnnnnnnnnnnnnnnnnnnnnnnnnnnnnnnnnnnnnnnnnnnnnnnnnnnnnnnnnnnnnnnnnnnnnnnnnnnnnnnnnnnnnnnnnnnnnnnnnnnnnnnnnnnnnnnnnnnnnnnnnnnnnnnnnnnnnnnnnnnnnnnnnnnnnnnnnnnnnnnnnnnnnnnnnnnnnnnnnnnnnnnnnnnnnnnnnnnnnnnnnnnnnnnnnnnnnnnnnnnnnnnnnnnnnnnnnnnnnnnnnnnnnnnnnnnnnnnnnnnnnnnnnnnnnnnnnnnnnnnnnnnnnnnnnnnnnnnnnnnnnnnnnnnnnnnnnnnnnnnnnnnnnnnnnnnnnnnnnnnnnnnnnnnnnnnnnnnnnnnnnnnnnnnnnnnnnnnnnnnnnnnnnnnnnnnnnnnnnnnnnnnnnnnnnnnnnnnnnnnnnnnnnnnnnnnnnnnnnnnnnnnnnnnnnnnnnnnnnnnnnnnnnnnnnnnnnnnnnnnnnnnnnnnnnnnnnnnnnnnnnnnnnnnnnnnnnnnnnnnnnnnnnnnnnnnnnnnnnnnnnnnnnnnnnnnnnnnnnnnnnnnnnnnnnnnnnnnnnnnnnnnnnnnnnnnnnnnnnnnnnnnnnnnnnnnnnnnnnnnnnnnnnnnnnnnnnnnnnnnnnnnnnnnnnnnnnnnnnnnnnnnnnnnnnnnnnnnnnnnnnnnnnnnnnnnnnnnnnnnnnnnnnnnnnnnnnnnnnnnnnnnnnnnnnnnnnnnnnnnnnnnnnnnnnnnnnnnnnnnnnnnnnnnnnnnnnnnnnnnnnnnnnnnnnnnnnnnnnnnnnnnnnnnnnnnnnnnnnnnnnnnnnnnnnnnnnnnnnnnnnnnnnnnnnnnnnnnnnnnnnnnnnnnnnnnnnnnnnnnnnnnnnnnnnnnnnnnnnnnnnnnnnnnnnnnnnnnnnnnnnnnnnnnnnnnnnnnnnnnnnnnnnnnnnnnnnnnnnnnnnnnnnnnnnnnnnnnnnnnnnnnnnnnnnnnnnnnnnnnnnnnnnnnnnnnnnnnnnnnnnnnnnnnnnnnnnnnnnnnnnnnnnnnnnnnnnnnnnnnnnnnnnnnnnnnnnnnnnnnnnnnnnnnnnnnnnnnnnnnnnnnnnnnnnnnnnnnnnnnnnnnnnnnnnnnnnnnnnnnnnnnnnnnnnnnnnnnnnnnnnnnnnnnnnnnnnnnnnnnnnnnnnnnnnnnnnnnnnnnnnnnnnnnnnnnnnnnnnnnnnnnnnnnnnnnnnnnnnnnnnnnnnnnnnnnnnnnnnnnnnnnnnnnnnnnnnnnnnnnnnnnnnnnnnnnnnnnnnnnnnnnnnnnnnnnnnnnnnnnnnnnnnnnnnnnnnnnnnnnnnnnnnnnnnnnnnnnnnnnnnnnnnnnnnnnnnnnnnnnnnnnnnnnnnnnnnnnnnnnnnnnnnnnnnnnnnnnnnnnnnnnnnnnnnnnnnnnnnnnnnnnnnnnnnnnnnnnnnnnnnnnnnnnnnnnnnnnnnnnnnnnnnnnnnnnnnnnnnnnnnnnnnnnnnnnnnnnnnnnnnnnnnnnnnnnnnnnnnnnnnnnnnnnnnnnnnnnnnnnnnnnnnnnnnnnnnnnnnnnnnnnnnnnnnnnnnnnnnnnnnnnnnnnnnnnnnnnnnnnnnnnnnnnnnnnnnnnnnnnnnnnnnnnnnnnnnnnnnnnnnnnnnnnnnnnnnnnnnnnnnnnnnnnnnnnnnnnnnnnnnnnnnnnnnnnnnnnnnnnnnnnnnnnnnnnnnnnnnnnnnnnnnnnnnnnnnnnnnnnnnnnnnnnnnnnnnnnnnnnnnnnnnnnnnnnnnnnnnnnnnnnnnnnnnnnnnnnnnnnnnnnnnnnnnnnnnnnnnnnnnnnnnnnnnnnnnnnnnnnnnnnnnnnnnnnnnnnnnnnnnnnnnnnnnnnnnnnnnnnnnnnnnnnnnnnnnnnnnnnnnnnnnnnnnnnnnnnnnnnnnnnnnnnnnnnnnnnnnnnnnnnnnnnnnnnnnnnnnnnnnnnnnnnnnnnnnnnnnnnnnnnnnnnnnnnnnnnnnnnnnnnnnnnnnnnnnnnnnnnnnnnnnnnnnnnnnnnnnnnnnnnnnnnnnnnnnnnnnnnnnnnnnnnnnnnnnnnnnnnnnnnnnnnnnnnnnnnnnnnnnnnnnnnnnnnnnnnnnnnnnnnnnnnnnnnnnnnnnnnnnnnnnnnnnnnnnnnnnnnnnnnnnnnnnnnnnnnnnnnnnnnnnnnnnnnnnnnnnnnnnnnnnnnnnnnnnnnnnnnnnnnnnnnnnnnnnnnnnnnnnnnnnnnnnnnnnnnnnnnnnnnnnnnnnnnnnnnnnnnnnnnnnnnnnnnnnnnnnnnnnnnnnnnnnnnnnnnnnnnnnnnnnnnnnnnnnnnnnnnnnnnnnnnnnnnnnnnnnnnnnnnnnnnnnnnnnnnnnnnnnnnnnnnnnnnnnnnnnnnnnnnnnnnnnnnnnnnnnnnnnnnnnnnnnnnnnnnnnnnnnnnnnnnnnnnnnnnnnnnnnnnnnnnnnnnnnnnnnnnnnnnnnnnnnnnnnnnnnnnnnnnnnnnnnnnnnnnnnnnnnnnnnnnnnnnnnnnnnnnnnnnnnnnnnnnnnnnnnnnnnnnnnnnnnnnnnnnnnnnnnnnnnnnnnnnnnnnnnnnnnnnnnnnnnnnnnnnnnnnnnnnnnnnnnnnnnnnnnnnnnnnnnnnnnnnnnnnnnnnnnnnnnnnnnnnnnnnnnnnnnnnnnnnnnnnnnnnnnnnnnnnnnnnnnnnnnnnnnnnnnnnnnnnnnnnnnnnnnnnnnnnnnnnnnnnnnnnnnnnnnnnnnnnnnnnnnnnnnnnnnnnnnnnnnnnnnnnnnnnnnnnnnnnnnnnnnnnnnnnnnnnnnnnnnnnnnnnnnnnnnnnnnnnnnnnnnnnnnnnnnnnnnnnnnnnnnnnnnnnnnnnnnnnnnnnnnnnnnnnnnnnnnnnnnnnnnnnnnnnnnnnnnnnnnnnnnnnnnnnnnnnnnnnnnnnnnnnnnnnnnnnnnnnnnnnnnnnnnnnnnnnnnnnnnnnnnnnnnnnnnnnnnnnnnnnnnnnnnnnnnnnnnnnnnnnnnnnnnnnnnnnnnnnnnnnnnnnnnnnnnnnnnnnnnnnnnnnnnnnnnnnnnnnnnnnnnnnnnnnnnnnnnnnnnnnnnnnnnnnnnnnnnnnnnnnnnnnnnnnnnnnnnnnnnnnnnnnnnnnnnnnnnnnnnnnnnnnnnnnnnnnnnnnnnnnnnnnnnnnnnnnnnnnnnnnnnnnnnnnnnnnnnnnnnnnnnnnnnnnnnnnnnnnnnnnnnnnnnnnnnnnnnnnnnnnnnnnnnnnnnnnnnnnnnnnnnnnnnnnnnnnnnnnnnnnnnnnnnnnnnnnnnnnnnnnnnnnnnnnnnnnnnnnnnnnnnnnnnnnnnnnnnnnnnnnnnnnnnnnnnnnnnnnnnnnnnnnnnnnnnnnnnnnnnnnnnnnnnnnnnnnnnnnnnnnnnnnnnnnnnnnnnnnnnnnnnnnnnnnnnnnnnnnnnnnnnnnnnnnnnnnnnnnnnnnnnnnnnnnnnnnnnnnnnnnnnnnnnnnnnnnnnnnnnnnnnnnnnnnnnnnnnnnnnnnnnnnnnnnnnnnnnnnnnnnnnnnnnnnnnnnnnnnnnnnnnnnnnnnnnnnnnnnnnnnnnnnnnnnnnnnnnnnnnnnnnnnnnnnnnnnnnnnnnnnnnnnnnnnnnnnnnnnnnnnnnnnnnnnnnnnnnnnnnnnnnnnnnnnnnnnnnnnnnnnnnnnnnnnnnnnnnnnnnnnnnnnnnnnnnnnnnnnnnnnnnnnnnnnnnnnnnnnnnnnnnnnnnnnnnnnnnnnnnnnnnnnnnnnnnnnnnnnnnnnnnnnnnnnnnnnnnnnnnnnnnnnnnnnnnnnnnnnnnnnnnnnnnnnnnnnnnnnnnnnnnnnnnnnnnnnnnnnnnnnnnnnnnnnnnnnnnnnnnnnnnnnnnnnnnnnnnnnnnnnnnnnnnnnnnnnnnnnnnnnnnnnnnnnnnnnnnnnnnnnnnnnnnnnnnnnnnnnnnnnnnnnnnnnnnnnnnnnnnnnnnnnnnnnnnnnnnnnnnnnnnnnnnnnnnnnnnnnnnnnnnnnnnnnnnnnnnnnnnnnnnnnnnnnnnnnnnnnnnnnnnnnnnnnnnnnnnnnnnnnnnnnnnnnnnnnnnnnnnnnnnnnnnnnnnnnnnnnnnnnnnnnnnnnnnnnnnnnnnnnnnnnnnnnnnnnnnnnnnnnnnnnnnnnnnnnnnnnnnnnnnnnnnnnnnnnnnnnnnnnnnnnnnnnnnnnnnnnnnnnnnnnnnnnnnnnnnnnnnnnnnnnnnnnnnnnnnnnnnnnnnnnnnnnnnnnnnnnnnnnnnnnnnnnnnnnnnnnnnnnnnnnnnnnnnnnnnnnnnnnnnnnnnnnnnnnnnnnnnnnnnnnnnnnnnnnnnnnnnnnnnnnnnnnnnnnnnnnnnnnnnnnnnnnnnnnnnnnnnnnnnnnnnnnnnnnnnnnnnnnnnnnnnnnnnnnnnnnnnnnnnnnnnnnnnnnnnnnnnnnnnnnnnnnnnnnnnnnnnnnnnnnnnnnnnnnnnnnnnnnnnnnnnnnnnnnnnnnnnnnnnnnnnnnnnnnnnnnnnnnnnnnnnnnnnnnnnnnnnnnnnnnnnnnnnnnnnnnnnnnnnnnnnnnnnnnnnnnnnnnnnnnnnnnnnnnnnnnnnnnnnnnnnnnnnnnnnnnnnnnnnnnnnnnnnnnnnnnnnnnnnnnnnnnnnnnnnnnnnnnnnnnnnnnnnnnnnnnnnnnnnnnnnnnnnnnnnnnnnnnnnnnnnnnnnnnnnnnnnnnnnnnnnnnnnnnnnnnnnnnnnnnnnnnnnnnnnnnnnnnnnnnnnnnnnnnnnnnnnnnnnnnnnnnnnnnnnnnnnnnnnnnnnnnnnnnnnnnnnnnnnnnnnnnnnnnnnnnnnnnnnnnnnnnnnnnnnnnnnnnnnnnnnnnnnnnnnnnnnnnnnnnnnnnnnnnnnnnnnnnnnnnnnnnnnnnnnnnnnnnnnnnnnnnnnnnnnnnnnnnnnnnnnnnnnnnnnnnnnnnnnnnnnnnnnnnnnnnnnnnnnnnnnnnnnnnnnnnnnnnnnnnnnnnnnnnnnnnnnnnnnnnnnnnnnnnnnnnnnnnnnnnnnnnnnnnnnnnnnnnnnnnnnnnnnnnnnnnnnnnnnnnnnnnnnnnnnnnnnnnnnnnnnnnnnnnnnnnnnnnnnnnnnnnnnnnnnnnnnnnnnnnnnnnnnnnnnnnnnnnnnnnnnnnnnnnnnnnnnnnnnnnnnnnnnnnnnnnnnnnnnnnnnnnnnnnnnnnnnnnnnnnnnnnnnnnnnnnnnnnnnnnnnnnnnnnnnnnnnnnnnnnnnnnnnnnnnnnnnnnnnnnnnnnnnnnnnnnnnnnnnnnnnnnnnnnnnnnnnnnnnnnnnnnnnnnnnnnnnnnnnnnnnnnnnnnnnnnnnnnnnnnnnnnnnnnnnnnnnnnnnnnnnnnnnnnnnnnnnnnnnnnnnnnnnnnnnnnnnnnnnnnnnnnnnnnnnnnnnnnnnnnnnnnnnnnnnnnnnnnnnnnnnnnnnnnnnnnnnnnnnnnnnnnnnnnnnnnnnnnnnnnnnnnnnnnnnnnnnnnnnnnnnnnnnnnnnnnnnnnnnnnnnnnnnnnnnnnnnnnnnnnnnnnnnnnnnnnnnnnnnnnnnnnnnnnnnnnnnnnnnnnnnnnnnnnnnnnnnnnnnnnnnnnnnnnnnnnnnnnnnnnnnnnnnnnnnnnnnnnnnnnnnnnnnnnnnnnnnnnnnnnnnnnnnnnnnnnnnnnnnnnnnnnnnnnnnnnnnnnnnnnnnnnnnnnnnnnnnnnnnnnnnnnnnnnnnnnnnnnnnnnnnnnnnnnnnnnnnnnnnnnnnnnnnnnnnnnnnnnnnnnnnnnnnnnnnnnnnnnnnnnnnnnnnnnnnnnnnnnnnnnnnnnnnnnnnnnnnnnnnnnnnnnnnnnnnnnnnnnnnnnnnnnnnnnnnnnnnnnnnnnnnnnnnnnnnnnnnnnnnnnnnnnnnnnnnnnnnnnnnnnnnnnnnnnnnnnnnnnnnnnnnnnnnnnnnnnnnnnnnnnnnnnnnnnnnnnnnnnnnnnnnnnnnnnnnnnnnnnnnnnnnnnnnnnnnnnnnnnnnnnnnnnnnnnnnnnnnnnnnnnnnnnnnnnnnnnnnnnnnnnnnnnnnnnnnnnnnnnnnnnnnnnnnnnnnnnnnnnnnnnnnnnnnnnnnnnnnnnnnnnnnnnnnnnnnnnnnnnnnnnnnnnnnnnnnnnnnnnnnnnnnnnnnnnnnnnnnnnnnnnnnnnnnnnnnnnnnnnnnnnnnnnnnnnnnnnnnnnnnnnnnnnnnnnnnnnnnnnnnnnnnnnnnnnnnnnnnnnnnnnnnnnnnnnnnnnnnnnnnnnnnnnnnnnnnnnnnnnnnnnnnnnnnnnnnnnnnnnnnnnnnnnnnnnnnnnnnnnnnnnnnnnnnnnnnnnnnnnnnnnnnnnnnnnnnnnnnnnnnnnnnnnnnnnnnnnnnnnnnnnnnnnnnnnnnnnnnnnnnnnnnnnnnnnnnnnnnnnnnnnnnnnnnnnnnnnnnnnnnnnnnnnnnnnnnnnnnnnnnnnnnnnnnnnnnnnnnnnnnnnnnnnnnnnnnnnnnnnnnnnnnnnnnnnnnnnnnnnnnnnnnnnnnnnnnnnnnnnnnnnnnnnnnnnnnnnnnnnnnnnnnnnnnnnnnnnnnnnnnnnnnnnnnnnnnnnnnnnnnnnnnnnnnnnnnnnnnnnnnnnnnnnnnnnnnnnnnnnnnnnnnnnnnnnnnnnnnnnnnnnnnnnnnnnnnnnnnnnnnnnnnnnnnnnnnnnnnnnnnnnnnnnnnnnnnnnnnnnnnnnnnnnnnnnnnnnnnnnnnnnnnnnnnnnnnnnnnnnnnnnnnnnnnnnnnnnnnnnnnnnnnnnnnnnnnnnnnnnnnnnnnnnnnnnnnnnnnnnnnnnnnnnnnnnnnnnnnnnnnnnnnnnnnnnnnnnnnnnnnnnnnnnnnnnnnnnnnnnnnnnnnnnnnnnnnnnnnnnnnnnnnnnnnnnnnnnnnnnnnnnnnnnnnnnnnnnnnnnnnnnnnnnnnnnnnnnnnnnnnnnnnnnnnnnnnnnnnnnnnnnnnnnnnnnnnnnnnnnnnnnnnnnnnnnnnnnnnnnnnnnnnnnnnnnnnnnnnnnnnnnnnnnnnnnnnnnnnnnnnnnnnnnnnnnnnnnnnnnnnnnnnnnnnnnnnnnnnnnnnnnnnnnnnnnnnnnnnnnnnnnnnnnnnnnnnnnnnnnnnnnnnnnnnnnnnnnnnnnnnnnnnnnnnnnnnnnnnnnnnnnnnnnnnnnnnnnnnnnnnnnnnnnnnnnnnnnnnnnnnnnnnnnnnnnnnnnnnnnnnnnnnnnnnnnnnnnnnnnnnnnnnnnnnnnnnnnnnnnnnnnnnnnnnnnnnnnnnnnnnnnnnnnnnnnnnnnnnnnnnnnnnnnnnnnnnnnnnnnnnnnnnnnnnnnnnnnnnnnnnnnnnnnnnnnnnnnnnnnnnnnnnnnnnnnnnnnnnnnnnnnnnnnnnnnnnnnnnnnnnnnnnnnnnnnnnnnnnnnnnnnnnnnnnnnnnnnnnnnnnnnnnnnnnnnnnnnnnnnnnnnnnnnnnnnnnnnnnnnnnnnnnnnnnnnnnnnnnnnnnnnnnnnnnnnnnnnnnnnnnnnnnnnnnnnnnnnnnnnnnnnnnnnnnnnnnnnnnnnnnnnnnnnnnnnnnnnnnnnnnnnnnnnnnnnnnnnnnnnnnnnnnnnnnnnnnnnnnnnnnnnnnnnnnnnnnnnnnnnnnnnnnnnnnnnnnnnnnnnnnnnnnnnnnnnnnnnnnnnnnnnnnnnnnnnnnnnnnnnnnnnnnnnnnnnnnnnnnnnnnnnnnnnnnnnnnnnnnnnnnnnnnnnnnnnnnnnnnnnnnnnnnnnnnnnnnnnnnnnnnnnnnnnnnnnnnnnnnnnnnnnnnnnnnnnnnnnnnnnnnnnnnnnnnnnnnnnnnnnnnnnnnnnnnnnnnnnnnnnnnnnnnnnnnnnnnnnnnnnnnnnnnnnnnnnnnnnnnnnnnnnnnnnnnnnnnnnnnnnnnnnnnnnnnnnnnnnnnnnnnnnnnnnnnnnnnnnnnnnnnnnnnnnnnnnnnnnnnnnnnnnnnnnnnnnnnnnnnnnnnnnnnnnnnnnnnnnnnnnnnnnnnnnnnnnnnnnnnnnnnnnnnnnnnnnnnnnnnnnnnnnnnnnnnnnnnnnnnnnnnnnnnnnnnnnnnnnnnnnnnnnnnnnnnnnnnnnnnnnnnnnnnnnnnnnnnnnnnnnnnnnnnnnnnnnnnnnnnnnnnnnnnnnnnnnnnnnnnnnnnnnnnnnnnnnnnnnnnnnnnnnnnnnnnnnnnnnnnnnnnnnnnnnnnnnnnnnnnnnnnnnnnnnnnnnnnnnnnnnnnnnnnnnnnnnnnnnnnnnnnnnnnnnnnnnnnnnnnnnnnnnnnnnnnnnnnnnnnnnnnnnnnnnnnnnnnnnnnnnnnnnnnnnnnnnnnnnnnnnnnnnnnnnnnnnnnnnnnnnnnnnnnnnnnnnnnnnnnnnnnnnnnnnnnnnnnnnnnnnnnnnnnnnnnnnnnnnnnnnnnnnnnnnnnnnnnnnnnnnnnnnnnnnnnnnnnnnnnnnnnnnnnnnnnnnnnnnnnnnnnnnnnnnnnnnnnnnnnnnnnnnnnnnnnnnnnnnnnnnnnnnnnnnnnnnnnnnnnnnnnnnnnnnnnnnnnnnnnnnnnnnnnnnnnnnnnnnnnnnnnnnnnnnnnnnnnnnnnnnnnnnnnnnnnnnnnnnnnnnnnnnnnnnnnnnnnnnnnnnnnnnnnnnnnnnnnnnnnnnnnnnnnnnnnnnnnnnnnnnnnnnnnnnnnnnnnnnnnnnnnnnnnnnnnnnnnnnnnnnnnnnnnnnnnnnnnnnnnnnnnnnnnnnnnnnnnnnnnnnnnnnnnnnnnnnnnnnnnnnnnnnnnnnnnnnnnnnnnnnnnnnnnnnnnnnnnnnnnnnnnnnnnnnnnnnnnnnnnnnnnnnnnnnnnnnnnnnnnnnnnnnnnnnnnnnnnnnnnnnnnnnnnnnnnnnnnnnnnnnnnnnnnnnnnnnnnnnnnnnnnnnnnnnnnnnnnnnnnnnnnnnnnnnnnnnnnnnnnnnnnnnnnnnnnnnnnnnnnnnnnnnnnnnnnnnnnnnnnnnnnnnnnnnnnnnnnnnnnnnnnnnnnnnnnnnnnnnnnnnnnnnnnnnnnnnnnnnnnnnnnnnnnnnnnnnnnnnnnnnnnnnnnnnnnnnnnnnnnnnnnnnnnnnnnnnnnnnnnnnnnnnnnnnnnnnnnnnnnnnnnnnnnnnnnnnnnnnnnnnnnnnnnnnnnnnnnnnnnnnnnnnnnnnnnnnnnnnnnnnnnnnnnnnnnnnnnnnnnnnnnnnnnnnnnnnnnnnnnnnnnnnnnnnnnnnnnnnnnnnnnnnnnnnnnnnnnnnnnnnnnnnnnnnnnnnnnnnnnnnnnnnnnnnnnnnnnnnnnnnnnnnnnnnnnnnnnnnnnnnnnnnnnnnnnnnnnnnnnnnnnnnnnnnnnnnnnnnnnnnnnnnnnnnnnnnnnnnnnnnnnnnnnnnnnnnnnnnnnnnnnnnnnnnnnnnnnnnnnnnnnnnnnnnnnnnnnnnnnnnnnnnnnnnnnnnnnnnnnnnnnnnnnnnnnnnnnnnnnnnnnnnnnnnnnnnnnnnnnnnnnnnnnnnnnnnnnnnnnnnnnnnnnnnnnnnnnnnnnnnnnnnnnnnnnnnnnnnnnnnnnnnnnnnnnnnnnnnnnnnnnnnnnnnnnnnnnnnnnnnnnnnnnnnnnnnnnnnnnnnnnnnnnnnnnnnnnnnnnnnnnnnnnnnnnnnnnnnnnnnnnnnnnnnnnnnnnnnnnnnnnnnnnnnnnnnnnnnnnnnnnnnnnnnnnnnnnnnnnnnnnnnnnnnnnnnnnnnnnnnnnnnnnnnnnnnnnnnnnnnnnnnnnnnnnnnnnnnnnnnnnnnnnnnnnnnnnnnnnnnnnnnnnnnnnnnnnnnnnnnnnnnnnnnnnnnnnnnnnnnnnnnnnnnnnnnnnnnnnnnnnnnnnnnnnnnnnnnnnnnnnnnnnnnnnnnnnnnnnnnnnnnnnnnnnnnnnnnnnnnnnnnnnnnnnnnnnnnnnnnnnnnnnnnnnnnnnnnnnnnnnnnnnnnnnnnnnnnnnnnnnnnnnnnnnnnnnnnnnnnnnnnnnnnnnnnnnnnnnnnnnnnnnnnnnnnnnnnnnnnnnnnnnnnnnnnnnnnnnnnnnnnnnnnnnnnnnnnnnnnnnnnnnnnnnnnnnnnnnnnnnnnnnnnnnnnnnnnnnnnnnnnnnnnnnnnnnnnnnnnnnnnnnnnnnnnnnnnnnnnnnnnnnnnnnnnnnnnnnnnnnnnnnnnnnnnnnnnnnnnnnnnnnnnnnnnnnnnnnnnnnnnnnnnnnnnnnnnnnnnnnnnnnnnnnnnnnnnnnnnnnnnnnnnnnnnnnnnnnnnnnnnnnnnnnnnnnnnnnnnnnnnnnnnnnnnnnnnnnnnnnnnnnnnnnnnnnnnnnnnnnnnnnnnnnnnnnnnnnnnnnnnnnnnnnnnnnnnnnnnnnnnnnnnnnnnnnnnnnnnnnnnnnnnnnnnnnnnnnnnnnnnnnnnnnnnnnnnnnnnnnnnnnnnnnnnnnnnnnnnnnnnnnnnnnnnnnnnnnnnnnnnnnnnnnnnnnnnnnnnnnnnnnnnnnnnnnnnnnnnnnnnnnnnnnnnnnnnnnnnnnnnnnnnnnnnnnnnnnnnnnnnnnnnnnnnnnnnnnnnnnnnnnnnnnnnnnnnnnnnnnnnnnnnnnnnnnnnnnnnnnnnnnnnnnnnnnnnnnnnnnnnnnnnnnnnnnnnnnnnnnnnnnnnnnnnnnnnnnnnnnnnnnnnnnnnnnnnnnnnnnnnnnnnnnnnnnnnnnnnnnnnnnnnnnnnnnnnnnnnnnnnnnnnnnnnnnnnnnnnnnnnnnnnnnnnnnnnnnnnnnnnnnnnnnnnnnnnnnnnnnnnnnnnnnnnnnnnnnnnnnnnnnnnnnnnnnnnnnnnnnnnnnnnnnnnnnnnnnnnnnnnnnnnnnnnnnnnnnnnnnnnnnnnnnnnnnnnnnnnnnnnnnnnnnnnnnnnnnnnnnnnnnnnnnnnnnnnnnnnnnnnnnnnnnnnnnnnnnnnnnnnnnnnnnnnnnnnnnnnnnnnnnnnnnnnnnnnnnnnnnnnnnnnnnnnnnnnnnnnnnnnnnnnnnnnnnnnnnnnnnnnnnnnnnnnnnnnnnnnnnnnnnnnnnnnnnnnnnnnnnnnnnnnnnnnnnnnnnnnnnnnnnnnnnnnnnnnnnnnnnnnnnnnnnnnnnnnnnnnnnnnnnnnnnnnnnnnnnnnnnnnnnnnnnnnnnnnnnnnnnnnnnnnnnnnnnnnnnnnnnnnnnnnnnnnnnnnnnnnnnnnnnnnnnnnnnnnnnnnnnnnnnnnnnnnnnnnnnnnnnnnnnnnnnnnnnnnnnnnnnnnnnnnnnnnnnnnnnnnnnnnnnnnnnnnnnnnnnnnnnnnnnnnnnnnnnnnnnnnnnnnnnnnnnnnnnnnnnnnnnnnnnnnnnnnnnnnnnnnnnnnnnnnnnnnnnnnnnnnnnnnnnnnnnnnnnnnnnnnnnnnnnnnnnnnnnnnnnnnnnnnnnnnnnnnnnnnnnnnnnnnnnnnnnnnnnnnnnnnnnnnnnnnnnnnnnnnnnnnnnnnnnnnnnnnnnnnnnnnnnnnnnnnnnnnnnnnnnnnnnnnnnnnnnnnnnnnnnnnnnnnnnnnnnnnnnnnnnnnnnnnnnnnnnnnnnnnnnnnnnnnnnnnnnnnnnnnnnnnnnnnnnnnnnnnnnnnnnnnnnnnnnnnnnnnnnnnnnnnnnnnnnnnnnnnnnnnnnnnnnnnnnnnnnnnnnnnnnnnnnnnnnnnnnnnnnnnnnnnnnnnnnnnnnnnnnnnnnnnnnnnnnnnnnnnnnnnnnnnnnnnnnnnnnnnnnnnnnnnnnnnnnnnnnnnnnnnnnnnnnnnnnnnnnnnnnnnnnnnnnnnnnnnnnnnnnnnnnnnnnnnnnnnnnnnnnnnnnnnnnnnnnnnnnnnnnnnnnnnnnnnnnnnnnnnnnnnnnnnnnnnnnnnnnnnnnnnnnnnnnnnnnnnnnnnnnnnnnnnnnnnnnnnnnnnnnnnnnnnnnnnnnnnnnnnnnnnnnnnnnnnnnnnnnnnnnnnnnnnnnnnnnnnnnnnnnnnnnnnnnnnnnnnnnnnnnnnnnnnnnnnnnnnnnnnnnnnnnnnnnnnnnnnnnnnnnnnnnnnnnnnnnnnnnnnnnnnnnnnnnnnnnnnnnnnnnnnnnnnnnnnnnnnnnnnnnnnnnnnnnnnnnnnnnnnnnnnnnnnnnnnnnnnnnnnnnnnnnnnnnnnnnnnnnnnnnnnnnnnnnnnnnnnnnnnnnnnnnnnnnnnnnnnnnnnnnnnnnnnnnnnnnnnnnnnnnnnnnnnnnnnnnnnnnnnnnnnnnnnnnnnnnnnnnnnnnnnnnnnnnnnnnnnnnnnnnnnnnnnnnnnnnnnnnnnnnnnnnnnnnnnnnnnnnnnnnnnnnnnnnnnnnnnnnnnnnnnnnnnnnnnnnnnnnnnnnnnnnnnnnnnnnnnnnnnnnnnnnnnnnnnnnnnnnnnnnnnnnnnnnnnnnnnnnnnnnnnnnnnnnnnnnnnnnnnnnnnnnnnnnnnnnnnnnnnnnnnnnnnnnnnnnnnnnnnnnnnnnnnnnnnnnnnnnnnnnnnnnnnnnnnnnnnnnnnnnnnnnnnnnnnnnnnnnnnnnnnnnnnnnnnnnnnnnnnnnnnnnnnnnnnnnnnnnnnnnnnnnnnnnnnnnnnnnnnnnnnnnnnnnnnnnnnnnnnnnnnnnnnnnnnnnnnnnnnnnnnnnnnnnnnnnnnnnnnnnnnnnnnnnnnnnnnnnnnnnnnnnnnnnnnnnnnnnnnnnnnnnnnnnnnnnnnnnnnnnnnnnnnnnnnnnnnnnnnnnnnnnnnnnnnnnnnnnnnnnnnnnnnnnnnnnnnnnnnnnnnnnnnnnnnnnnnnnnnnnnnnnnnnnnnnnnnnnnnnnnnnnnnnnnnnnnnnnnnnnnnnnnnnnnnnnnnnnnnnnnnnnnnnnnnnnnnnnnnnnnnnnnnnnnnnnnnnnnnnnnnnnnnnnnnnnnnnnnnnnnnnnnnnnnnnnnnnnnnnnnnnnnnnnnnnnnnnnnnnnnnnnnnnnnnnnnnnnnnnnnnnnnnnnnnnnnnnnnnnnnnnnnnnnnnnnnnnnnnnnnnnnnnnnnnnnnnnnnnnnnnnnnnnnnnnnnnnnnnnnnnnnnnnnnnnnnnnnnnnnnnnnnnnnnnnnnnnnnnnnnnnnnnnnnnnnnnnnnnnnnnnnnnnnnnnnnnnnnnnnnnnnnnnnnnnnnnnnnnnnnnnnnnnnnnnnnnnnnnnnnnnnnnnnnnnnnnnnnnnnnnnnnnnnnnnnnnnnnnnnnnnnnnnnnnnnnnnnnnnnnnnnnnnnnnnnnnnnnnnnnnnnnnnnnnnnnnnnnnnnnnnnnnnnnnnnnnnnnnnnnnnnnnnnnnnnnnnnnnnnnnnnnnnnnnnnnnnnnnnnnnnnnnnnnnnnnnnnnnnnnnnnnnnnnnnnnnnnnnnnnnnnnnnnnnnnnnnnnnnnnnnnnnnnnnnnnnnnnnnnnnnnnnnnnnnnnnnnnnnnnnnnnnnnnnnnnnnnnnnnnnnnnnnnnnnnnnnnnnnnnnnnnnnnnnnnnnnnnnnnnnnnnnnnnnnnnnnnnnnnnnnnnnnnnnnnnnnnnnnnnnnnnnnnnnnnnnnnnnnnnnnnnnnnnnnnnnnnnnnnnnnnnnnnnnnnnnnnnnnnnnnnnnnnnnnnnnnnnnnnnnnnnnnnnnnnnnnnnnnnnnnnnnnnnnnnnnnnnnnnnnnnnnnnnnnnnnnnnnnnnnnnnnnnnnnnnnnnnnnnnnnnnnnnnnnnnnnnnnnnnnnnnnnnnnnnnnnnnnnnnnnnnnnnnnnnnnnnnnnnnnnnnnnnnnnnnnnnnnnnnnnnnnnnnnnnnnnnnnnnnnnnnnnnnnnnnnnnnnnnnnnnnnnnnnnnnnnnnnnnnnnnnnnnnnnnnnnnnnnnnnnnnnnnnnnnnnnnnnnnnnnnnnnnnnnnnnnnnnnnnnnnnnnnnnnnnnnnnnnnnnnnnnnnnnnnnnnnnnnnnnnnnnnnnnnnnnnnnnnnnnnnnnnnnnnnnnnnnnnnnnnnnnnnnnnnnnnnnnnnnnnnnnnnnnnnnnnnnnnnnnnnnnnnnnnnnnnnnnnnnnnnnnnnnnnnnnnnnnnnnnnnnnnnnnnnnnnnnnnnnnnnnnnnnnnnnnnnnnnnnnnnnnnnnnnnnnnnnnnnnnnnnnnnnnnnnnnnnnnnnnnnnnnnnnnnnnnnnnnnnnnnnnnnnnnnnnnnnnnnnnnnnnnnnnnnnnnnnnnnnnnnnnnnnnnnnnnnnnnnnnnnnnnnnnnnnnnnnnnnnnnnnnnnnnnnnnnnnnnnnnnnnnnnnnnnnnnnnnnnnnnnnnnnnnnnnnnnnnnnnnnnnnnnnnnnnnnnnnnnnnnnnnnnnnnnnnnnnnnnnnnnnnnnnnnnnnnnnnnnnnnnnnnnnnnnnnnnnnnnnnnnnnnnnnnnnnnnnnnnnnnnnnnnnnnnnnnnnnnnnnnnnnnnnnnnnnnnnnnnnnnnnnnnnnnnnnnnnnnnnnnnnnnnnnnnnnnnnnnnnnnnnnnnnnnnnnnnnnnnnnnnnnnnnnnnnnnnnnnnnnnnnnnnnnnnnnnnnnnnnnnnnnnnnnnnnnnnnnnnnnnnnnnnnnnnnnnnnnnnnnnnnnnnnnnnnnnnnnnnnnnnnnnnnnnnnnnnnnnnnnnnnnnnnnnnnnnnnnnnnnnnnnnnnnnnnnnnnnnnnnnnnnnnnnnnnnnnnnnnnnnnnnnnnnnnnnnnnnnnnnnnnnnnnnnnnnnnnnnnnnnnnnnnnnnnnnnnnnnnnnnnnnnnnnnnnnnnnnnnnnnnnnnnnnnnnnnnnnnnnnnnnnnnnnnnnnnnnnnnnnnnnnnnnnnnnnnnnnnnnnnnnnnnnnnnnnnnnnnnnnnnnnnnnnnnnnnnnnnnnnnnnnnnnnnnnnnnnnnnnnnnnnnnnnnnnnnnnnnnnnnnnnnnnnnnnnnnnnnnnnnnnnnnnnnnnnnnnnnnnnnnnnnnnnnnnnnnnnnnnnnnnnnnnnnnnnnnnnnnnnnnnnnnnnnnnnnnnnnnnnnnnnnnnnnnnnnnnnnnnnnnnnnnnnnnnnnnnnnnnnnnnnnnnnnnnnnnnnnnnnnnnnnnnnnnnnnnnnnnnnnnnnnnnnnnnnnnnnnnnnnnnnnnnnnnnnnnnnnnnnnnnnnnnnnnnnnnnnnnnnnnnnnnnnnnnnnnnnnnnnnnnnnnnnnnnnnnnnnnnnnnnnnnnnnnnnnnnnnnnnnnnnnnnnnnnnnnnnnnnnnnnnnnnnnnnnnnnnnnnnnnnnnnnnnnnnnnnnnnnnnnnnnnnnnnnnnnnnnnnnnnnnnnnnnnnnnnnnnnnnnnnnnnnnnnnnnnnnnnnnnnnnnnnnnnnnnnnnnnnnnnnnnnnnnnnnnnnnnnnnnnnnnnnnnnnnnnnnnnnnnnnnnnnnnnnnnnnnnnnnnnnnnnnnnnnnnnnnnnnnnnnnnnnnnnnnnnnnnnnnnnnnnnnnnnnnnnnnnnnnnnnnnnnnnnnnnnnnnnnnnnnnnnnnnnnnnnnnnnnnnnnnnnnnnnnnnnnnnnnnnnnnnnnnnnnnnnnnnnnnnnnnnnnnnnnnnnnnnnnnnnnnnnnnnnnnnnnnnnnnnnnnnnnnnnnnnnnnnnnnnnnnnnnnnnnnnnnnnnnnnnnnnnnnnnnnnnnnnnnnnnnnnnnnnnnnnnnnnnnnnnnnnnnnnnnnnnnnnnnnnnnnnnnnnnnnnnnnnnnnnnnnnnnnnnnnnnnnnnnnnnnnnnnnnnnnnnnnnnnnnnnnnnnnnnnnnnnnnnnnnnnnnnnnnnnnnnnnnnnnnnnnnnnnnnnnnnnnnnnnnnnnnnnnnnnnnnnnnnnnnnnnnnnnnnnnnnnnnnnnnnnnnnnnnnnnnnnnnnnnnnnnnnnnnnnnnnnnnnnnnnnnnnnnnnnnnnnnnnnnnnnnnnnnnnnnnnnnnnnnnnnnnnnnnnnnnnnnnnnnnnnnnnnnnnnnnnnnnnnnnnnnnnnnnnnnnnnnnnnnnnnnnnnnnnnnnnnnnnnnnnnnnnnnnnnnnnnnnnnnnnnnnnnnnnnnnnnnnnnnnnnnnnnnnnnnnnnnnnnnnnnnnnnnnnnnnnnnnnnnnnnnnnnnnnnnnnnnnnnnnnnnnnnnnnnnnnnnnnnnnnnnnnnnnnnnnnnnnnnnnnnnnnnnnnnnnnnnnnnnnnnnnnnnnnnnnnnnnnnnnnnnnnnnnnnnnnnnnnnnnnnnnnnnnnnnnnnnnnnnnnnnnnnnnnnnnnnnnnnnnnnnnnnnnnnnnnnnnnnnnnnnnnnnnnnnnnnnnnnnnnnnnnnnnnnnnnnnnnnnnnnnnnnnnnnnnnnnnnnnnnnnnnnnnnnnnnnnnnnnnnnnnnnnnnnnnnnnnnnnnnnnnnnnnnnnnnnnnnnnnnnnnnnnnnnnnnnnnnnnnnnnnnnnnnnnnnnnnnnnnnnnnnnnnnnnnnnnnnnnnnnnnnnnnnnnnnnnnnnnnnnnnnnnnnnnnnnnnnnnnnnnnnnnnnnnnnnnnnnnnnnnnnnnnnnnnnnnnnnnnnnnnnnnnnnnnnnnnnnnnnnnnnnnnnnnnnnnnnnnnnnnnnnnnnnnnnnnnnnnnnnnnnnnnnnnnnnnnnnnnnnnnnnnnnnnnnnnnnnnnnnnnnnnnnnnnnnnnnnnnnnnnnnnnnnnnnnnnnnnnnnnnnnnnnnnnnnnnnnnnnnnnnnnnnnnnnnnnnnnnnnnnnnnnnnnnnnnnnnnnnnnnnnnnnnnnnnnnnnnnnnnnnnnnnnnnnnnnnnnnnnnnnnnnnnnnnnnnnnnnnnnnnnnnnnnnnnnnnnnnnnnnnnnnnnnnnnnnnnnnnnnnnnnnnnnnnnnnnnnnnnnnnnnnnnnnnnnnnnnnnnnnnnnnnnnnnnnnnnnnnnnnnnnnnnnnnnnnnnnnnnnnnnnnnnnnnnnnnnnnnnnnnnnnnnnnnnnnnnnnnnnnnnnnnnnnnnnnnnnnnnnnnnnnnnnnnnnnnnnnnnnnnnnnnnnnnnnnnnnnnnnnnnnnnnnnnnnnnnnnnnnnnnnnnnnnnnnnnnnnnnnnnnnnnnnnnnnnnnnnnnnnnnnnnnnnnnnnnnnnnnnnnnnnnnnnnnnnnnnnnnnnnnnnnnnnnnnnnnnnnnnnnnnnnnnnnnnnnnnnnnnnnnnnnnnnnnnnnnnnnnnnnnnnnnnnnnnnnnnnnnnnnnnnnnnnnnnnnnnnnnnnnnnnnnnnnnnnnnnnnnnnnnnnnnnnnnnnnnnnnnnnnnnnnnnnnnnnnnnnnnnnnnnnnnnnnnnnnnnnnnnnnnnnnnnnnnnnnnnnnnnnnnnnnnnnnnnnnnnnnnnnnnnnnnnnnnnnnnnnnnnnnnnnnnnnnnnnnnnnnnnnnnnnnnnnnnnnnnnnnnnnnnnnnnnnnnnnnnnnnnnnnnnnnnnnnnnnnnnnnnnnnnnnnnnnnnnnnnnnnnnnnnnnnnnnnnnnnnnnnnnnnnnnnnnnnnnnnnnnnnnnnnnnnnnnnnnnnnnnnnnnnnnnnnnnnnnnnnnnnnnnnnnnnnnnnnnnnnnnnnnnnnnnnnnnnnnnnnnnnnnnnnnnnnnnnnnnnnnnnnnnnnnnnnnnnnnnnnnnnnnnnnnnnnnnnnnnnnnnnnnnnnnnnnnnnnnnnnnnnnnnnnnnnnnnnnnnnnnnnnnnnnnnnnnnnnnnnnnnnnnnnnnnnnnnnnnnnnnnnnnnnnnnnnnnnnnnnnnnnnnnnnnnnnnnnnnnnnnnnnnnnnnnnnnnnnnnnnnnnnnnnnnnnnnnnnnnnnnnnnnnnnnnnnnnnnnnnnnnnnnnnnnnnnnnnnnnnnnnnnnnnnnnnnnnnnnnnnnnnnnnnnnnnnnnnnnnnnnnnnnnnnnnnnnnnnnnnnnnnnnnnnnnnnnnnnnnnnnnnnnnnnnnnnnnnnnnnnnnnnnnnnnnnnnnnnnnnnnnnnnnnnnnnnnnnnnnnnnnnnnnnnnnnnnnnnnnnnnnnnnnnnnnnnnnnnnnnnnnnnnnnnnnnnnnnnnnnnnnnnnnnnnnnnnnnnnnnnnnnnnnnnnnnnnnnnnnnnnnnnnnnnnnnnnnnnnnnnnnnnnnnnnnnnnnnnnnnnnnnnnnnnnnnnnnnnnnnnnnnnnnnnnnnnnnnnnnnnnnnnnnnnnnnnnnnnnnnnnnnnnnnnnnnnnnnnnnnnnnnnnnnnnnnnnnnnnnnnnnnnnnnnnnnnnnnnnnnnnnnnnnnnnnnnnnnnnnnnnnnnnnnnnnnnnnnnnnnnnnnnnnnnnnnnnnnnnnnnnnnnnnnnnnnnnnnnnnnnnnnnnnnnnnnnnnnnnnnnnnnnnnnnnnnnnnnnnnnnnnnnnnnnnnnnnnnnnnnnnnnnnnnnnnnnnnnnnnnnnnnnnnnnnnnnnnnnnnnnnnnnnnnnnnnnnnnnnnnnnnnnnnnnnnnnnnnnnnnnnnnnnnnnnnnnnnnnnnnnnnnnnnnnnnnnnnnnnnnnnnnnnnnnnnnnnnnnnnnnnnnnnnnnnnnnnnnnnnnnnnnnnnnnnnnnnnnnnnnnnnnnnnnnnnnnnnnnnnnnnnnnnnnnnnnnnnnnnnnnnnnnnnnnnnnnnnnnnnnnnnnnnnnnnnnnnnnnnnnnnnnnnnnnnnnnnnnnnnnnnnnnnnnnnnnnnnnnnnnnnnnnnnnnnnnnnnnnnnnnnnnnnnnnnnnnnnnnnnnnnnnnnnnnnnnnnnnnnnnnnnnnnnnnnnnnnnnnnnnnnnnnnnnnnnnnnnnnnnnnnnnnnnnnnnnnnnnnnnnnnnnnnnnnnnnnnnnnnnnnnnnnnnnnnnnnnnnnnnnnnnnnnnnnnnnnnnnnnnnnnnnnnnnnnnnnnnnnnnnnnnnnnnnnnnnnnnnnnnnnnnnnnnnnnnnnnnnnnnnnnnnnnnnnnnnnnnnnnnnnnnnnnnnnnnnnnnnnnnnnnnnnnnnnnnnnnnnnnnnnnnnnnnnnnnnnnnnnnnnnnnnnnnnnnnnnnnnnnnnnnnnnnnnnnnnnnnnnnnnnnnnnnnnnnnnnnnnnnnnnnnnnnnnnnnnnnnnnnnnnnnnnnnnnnnnnnnnnnnnnnnnnnnnnnnnnnnnnnnnnnnnnnnnnnnnnnnnnnnnnnnnnnnnnnnnnnnnnnnnnnnnnnnnnnnnnnnnnnnnnnnnnnnnnnnnnnnnnnnnnnnnnnnnnnnnnnnnnnnnnnnnnnnnnnnnnnnnnnnnnnnnnnnnnnnnnnnnnnnnnnnnnnnnnnnnnnnnnnnnnnnnnnnnnnnnnnnnnnnnnnnnnnnnnnnnnnnnnnnnnnnnnnnnnnnnnnnnnnnnnnnnnnnnnnnnnnnnnnnnnnnnnnnnnnnnnnnnnnnnnnnnnnnnnnnnnnnnnnnnnnnnnnnnnnnnnnnnnnnnnnnnnnnnnnnnnnnnnnnnnnnnnnnnnnnnnnnnnnnnnnnnnnnnnnnnnnnnnnnnnnnnnnnnnnnnnnnnnnnnnnnnnnnnnnnnnnnnnnnnnnnnnnnnnnnnnnnnnnnnnnnnnnnnnnnnnnnnnnnnnnnnnnnnnnnnnnnnnnnnnnnnnnnnnnnnnnnnnnnnnnnnnnnnnnnnnnnnnnnnnnnnnnnnnnnnnnnnnnnnnnnnnnnnnnnnnnnnnnnnnnnnnnnnnnnnnnnnnnnnnnnnnnnnnnnnnnnnnnnnnnnnnnnnnnnnnnnnnnnnnnnnnnnnnnnnnnnnnnnnnnnnnnnnnnnnnnnnnnnnnnnnnnnnnnnnnnnnnnnnnnnnnnnnnnnnnnnnnnnnnnnnnnnnnnnnnnnnnnnnnnnnnnnnnnnnnnnnnnnnnnnnnnnnnnnnnnnnnnnnnnnnnnnnnnnnnnnnnnnnnnnnnnnnnnnnnnnnnnnnnnnnnnnnnnnnnnnnnnnnnnnnnnnnnnnnnnnnnnnnnnnnnnnnnnnnnnnnnnnnnnnnnnnnnnnnnnnnnnnnnnnnnnnnnnnnnnnnnnnnnnnnnnnnnnnnnnnnnnnnnnnnnnnnnnnnnnnnnnnnnnnnnnnnnnnnnnnnnnnnnnnnnnnnnnnnnnnnnnnnnnnnnnnnnnnnnnnnnnnnnnnnnnnnnnnnnnnnnnnnnnnnnnnnnnnnnnnnnnnnnnnnnnnnnnnnnnnnnnnnnnnnnnnnnnnnnnnnnnnnnnnnnnnnnnnnnnnnnnnnnnnnnnnnnnnnnnnnnnnnnnnnnnnnnnnnnnnnnnnnnnnnnnnnnnnnnnnnnnnnnnnnnnnnnnnnnnnnnnnnnnnnnnnnnnnnnnnnnnnnnnnnnnnnnnnnnnnnnnnnnnnnnnnnnnnnnnnnnnnnnnnnnnnnnnnnnnnnnnnnnnnnnnnnnnnnnnnnnnnnnnnnnnnnnnnnnnnnnnnnnnnnnnnnnnnnnnnnnnnnnnnnnnnnnnnnnnnnnnnnnnnnnnnnnnnnnnnnnnnnnnnnnnnnnnnnnnnnnnnnnnnnnnnnnnnnnnnnnnnnnnnnnnnnnnnnnnnnnnnnnnnnnnnnnnnnnnnnnnnnnnnnnnnnnnnnnnnnnnnnnnnnnnnnnnnnnnnnnnnnnnnnnnnnnnnnnnnnnnnnnnnnnnnnnnnnnnnnnnnnnnnnnnnnnnnnnnnnnnnnnnnnnnnnnnnnnnnnnnnnnnnnnnnnnnnnnnnnnnnnnnnnnnnnnnnnnnnnnnnnnnnnnnnnnnnnnnnnnnnnnnnnnnnnnnnnnnnnnnnnnnnnnnnnnnnnnnnnnnnnnnnnnnnnnnnnnnnnnnnnnnnnnnnnnnnnnnnnnnnnnnnnnnnnnnnnnnnnnnnnnnnnnnnnnnnnnnnnnnnnnnnnnnnnnnnnnnnnnnnnnnnnnnnnnnnnnnnnnnnnnnnnnnnnnnnnnnnnnnnnnnnnnnnnnnnnnnnnnnnnnnnnnnnnnnnnnnnnnnnnnnnnnnnnnnnnnnnnnnnnnnnnnnnnnnnnnnnnnnnnnnnnnnnnnnnnnnnnnnnnnnnnnnnnnnnnnnnnnnnnnnnnnnnnnnnnnnnnnnnnnnnnnnnnnnnnnnnnnnnnnnnnnnnnnnnnnnnnnnnnnnnnnnnnnnnnnnnnnnnnnnnnnnnnnnnnnnnnnnnnnnnnnnnnnnnnnnnnnnnnnnnnnnnnnnnnnnnnnnnnnnnnnnnnnnnnnnnnnnnnnnnnnnnnnnnnnnnnnnnnnnnnnnnnnnnnnnnnnnnnnnnnnnnnnnnnnnnnnnnnnnnnnnnnnnnnnnnnnnnnnnnnnnnnnnnnnnnnnnnnnnnnnnnnnnnnnnnnnnnnnnnnnnnnnnnnnnnnnnnnnnnnnnnnnnnnnnnnnnnnnnnnnnnnnnnnnnnnnnnnnnnnnnnnnnnnnnnnnnnnnnnnnnnnnnnnnnnnnnnnnnnnnnnnnnnnnnnnnnnnnnnnnnnnnnnnnnnnnnnnnnnnnnnnnnnnnnnnnnnnnnnnnnnnnnnnnnnnnnnnnnnnnnnnnnnnnnnnnnnnnnnnnnnnnnnnnnnnnnnnnnnnnnnnnnnnnnnnnnnnnnnnnnnnnnnnnnnnnnnnnnnnnnnnnnnnnnnnnnnnnnnnnnnnnnnnnnnnnnnnnnnnnnnnnnnnnnnnnnnnnnnnnnnnnnnnnnnnnnnnnnnnnnnnnnnnnnnnnnnnnnnnnnnnnnnnnnnnnnnnnnnnnnnnnnnnnnnnnnnnnnnnnnnnnnnnnnnnnnnnnnnnnnnnnnnnnnnnnnnnnnnnnnnnnnnnnnnnnnnnnnnnnnnnnnnnnnnnnnnnnnnnnnnnnnnnnnnnnnnnnnnnnnnnnnnnnnnnnnnnnnnnnnnnnnnnnnnnnnnnnnnnnnnnnnnnnnnnnnnnnnnnnnnnnnnnnnnnnnnnnnnnnnnnnnnnnnnnnnnnnnnnnnnnnnnnnnnnnnnnnnnnnnnnnnnnnnnnnnnnnnnnnnnnnnnnnnnnnnnnnnnnnnnnnnnnnnnnnnnnnnnnnnnnnnnnnnnnnnnnnnnnnnnnnnnnnnnnnnnnnnnnnnnnnnnnnnnnnnnnnnnnnnnnnnnnnnnnnnnnnnnnnnnnnnnnnnnnnnnnnnnnnnnnnnnnnnnnnnnnnnnnnnnnnnnnnnnnnnnnnnnnnnnnnnnnnnnnnnnnnnnnnnnnnnnnnnnnnnnnnnnnnnnnnnnnnnnnnnnnnnnnnnnnnnnnnnnnnnnnnnnnnnnnnnnnnnnnnnnnnnnnnnnnnnnnnnnnnnnnnnnnnnnnnnnnnnnnnnnnnnnnnnnnnnnnnnnnnnnnnnnnnnnnnnnnnnnnnnnnnnnnnnnnnnnnnnnnnnnnnnnnnnnnnnnnnnnnnnnnnnnnnnnnnnnnnnnnnnnnnnnnnnnnnnnnnnnnnnnnnnnnnnnnnnnnnnnnnnnnnnnnnnnnnnnnnnnnnnnnnnnnnnnnnnnnnnnnnnnnnnnnnnnnnnnnnnnnnnnnnnnnnnnnnnnnnnnnnnnnnnnnnnnnnnnnnnnnnnnnnnnnnnnnnnnnnnnnnnnnnnnnnnnnnnnnnnnnnnnnnnnnnnnnnnnnnnnnnnnnnnnnnnnnnnnnnnnnnnnnnnnnnnnnnnnnnnnnnnnnnnnnnnnnnnnnnnnnnnnnnnnnnnnnnnnnnnnnnnnnnnnnnnnnnnnnnnnnnnnnnnnnnnnnnnnnnnnnnnnnnnnnnnnnnnnnnnnnnnnnnnnnnnnnnnnnnnnnnnnnnnnnnnnnnnnnnnnnnnnnnnnnnnnnnnnnnnnnnnnnnnnnnnnnnnnnnnnnnnnnnnnnnnnnnnnnnnnnnnnnnnnnnnnnnnnnnnnnnnnnnnnnnnnnnnnnnnnnnnnnnnnnnnnnnnnnnnnnnnnnnnnnnnnnnnnnnnnnnnnnnnnnnnnnnnnnnnnnnnnnnnnnnnnnnnnnnnnnnnnnnnnnnnnnnnnnnnnnnnnnnnnnnnnnnnnnnnnnnnnnnnnnnnnnnnnnnnnnnnnnnnnnnnnnnnnnnnnnnnnnnnnnnnnnnnnnnnnnnnnnnnnnnnnnnnnnnnnnnnnnnnnnnnnnnnnnnnnnnnnnnnnnnnnnnnnnnnnnnnnnnnnnnnnnnnnnnnnnnnnnnnnnnnnnnnnnnnnnnnnnnnnnnnnnnnnnnnnnnnnnnnnnnnnnnnnnnnnnnnnnnnnnnnnnnnnnnnnnnnnnnnnnnnnnnnnnnnnnnnnnnnnnnnnnnnnnnnnnnnnnnnnnnnnnnnnnnnnnnnnnnnnnnnnnnnnnnnnnnnnnnnnnnnnnnnnnnnnnnnnnnnnnnnnnnnnnnnnnnnnnnnnnnnnnnnnnnnnnnnnnnnnnnnnnnnnnnnnnnnnnnnnnnnnnnnnnnnnnnnnnnnnnnnnnnnnnnnnnnnnnnnnnnnnnnnnnnnnnnnnnnnnnnnnnnnnnnnnnnnnnnnnnnnnnnnnnnnnnnnnnnnnnnnnnnnnnnnnnnnnnnnnnnnnnnnnnnnnnnnnnnnnnnnnnnnnnnnnnnnnnnnnnnnnnnnnnnnnnnnnnnnnnnnnnnnnnnnnnnnnnnnnnnnnnnnnnnnnnnnnnnnnnnnnnnnnnnnnnnnnnnnnnnnnnnnnnnnnnnnnnnnnnnnnnnnnnnnnnnnnnnnnnnnnnnnnnnnnnnnnnnnnnnnnnnnnnnnnnnnnnnnnnnnnnnnnnnnnnnnnnnnnnnnnnnnnnnnnnnnnnnnnnnnnnnnnnnnnnnnnnnnnnnnnnnnnnnnnnnnnnnnnnnnnnnnnnnnnnnnnnnnnnnnnnnnnnnnnnnnnnnnnnnnnnnnnnnnnnnnnnnnnnnnnnnnnnnnnnnnnnnnnnnnnnnnnnnnnnnnnnnnnnnnnnnnnnnnnnnnnnnnnnnnnnnnnnnnnnnnnnnnnnnnnnnnnnnnnnnnnnnnnnnnnnnnnnnnnnnnnnnnnnnnnnnnnnnnnnnnnnnnnnnnnnnnnnnnnnnnnnnnnnnnnnnnnnnnnnnnnnnnnnnnnnnnnnnnnnnnnnnnnnnnnnnnnnnnnnnnnnnnnnnnnnnnnnnnnnnnnnnnnnnnnnnnnnnnnnnnnnnnnnnnnnnnnnnnnnnnnnnnnnnnnnnnnnnnnnnnnnnnnnnnnnnnnnnnnnnnnnnnnnnnnnnnnnnnnnnnnnnnnnnnnnnnnnnnnnnnnnnnnnnnnnnnnnnnnnnnnnnnnnnnnnnnnnnnnnnnnnnnnnnnnnnnnnnnnnnnnnnnnnnnnnnnnnnnnnnnnnnnnnnnnnnnnnnnnnnnnnnnnnnnnnnnnnnnnnnnnnnnnnnnnnnnnnnnnnnnnnnnnnnnnnnnnnnnnnnnnnnnnnnnnnnnnnnnnnnnnnnnnnnnnnnnnnnnnnnnnnnnnnnnnnnnnnnnnnnnnnnnnnnnnnnnnnnnnnnnnnnnnnnnnnnnnnnnnnnnnnnnnnnnnnnnnnnnnnnnnnnnnnnnnnnnnnnnnnnnnnnnnnnnnnnnnnnnnnnnnnnnnnnnnnnnnnnnnnnnnnnnnnnnnnnnnnnnnnnnnnnnnnnnnnnnnnnnnnnnnnnnnnnnnnnnnnnnnnnnnnnnnnnnnnnnnnnnnnnnnnnnnnnnnnnnnnnnnnnnnnnnnnnnnnnnnnnnnnnnnnnnnnnnnnnnnnnnnnnnnnnnnnnnnnnnnnnnnnnnnnnnnnnnnnnnnnnnnnnnnnnnnnnnnnnnnnnnnnnnnnnnnnnnnnnnnnnnnnnnnnnnnnnnnnnnnnnnnnnnnnnnnnnnnnnnnnnnnnnnnnnnnnnnnnnnnnnnnnnnnnnnnnnnnnnnnnnnnnnnnnnnnnnnnnnnnnnnnnnnnnnnnnnnnnnnnnnnnnnnnnnnnnnnnnnnnnnnnnnnnnnnnnnnnnnnnnnnnnnnnnnnnnnnnnnnnnnnnnnnnnnnnnnnnnnnnnnnnnnnnnnnnnnnnnnnnnnnnnnnnnnnnnnnnnnnnnnnnnnnnnnnnnnnnnnnnnnnnnnnnnnnnnnnnnnnnnnnnnnnnnnnnnnnnnnnnnnnnnnnnnnnnnnnnnnnnnnnnnnnnnnnnnnnnnnnnnnnnnnnnnnnnnnnnnnnnnnnnnnnnnnnnnnnnnnnnnnnnnnnnnnnnnnnnnnnnnnnnnnnnnnnnnnnnnnnnnnnnnnnnnnnnnnnnnnnnnnnnnnnnnnnnnnnnnnnnnnnnnnnnnnnnnnnnnnnnnnnnnnnnnnnnnnnnnnnnnnnnnnnnnnnnnnnnnnnnnnnnnnnnnnnnnnnnnnnnnnnnnnnnnnnnnnnnnnnnnnnnnnnnnnnnnnnnnnnnnnnnnnnnnnnnnnnnnnnnnnnnnnnnnnnnnnnnnnnnnnnnnnnnnnnnnnnnnnnnnnnnnnnnnnnnnnnnnnnnnnnnnnnnnnnnnnnnnnnnnnnnnnnnnnnnnnnnnnnnnnnnnnnnnnnnnnnnnnnnnnnnnnnnnnnnnnnnnnnnnnnnnnnnnnnnnnnnnnnnnnnnnnnnnnnnnnnnnnnnnnnnnnnnnnnnnnnnnnnnnnnnnnnnnnnnnnnnnnnnnnnnnnnnnnnnnnnnnnnnnnnnnnnnnnnnnnnnnnnnnnnnnnnnnnnnnnnnnnnnnnnnnnnnnnnnnnnnnnnnnnnnnnnnnnnnnnnnnnnnnnnnnnnnnnnnnnnnnnnnnnnnnnnnnnnnnnnnnnnnnnnnnnnnnnnnnnnnnnnnnnnnnnnnnnnnnnnnnnnnnnnnnnnnnnnnnnnnnnnnnnnnnnnnnnnnnnnnnnnnnnnnnnnnnnnnnnnnnnnnnnnnnnnnnnnnnnnnnnnnnnnnnnnnnnnnnnnnnnnnnnnnnnnnnnnnnnnnnnnnnnnnnnnnnnnnnnnnnnnnnnnnnnnnnnnnnnnnnnnnnnnnnnnnnnnnnnnnnnnnnnnnnnnnnnnnnnnnnnnnnnnnnnnnnnnnnnnnnnnnnnnnnnnnnnnnnnnnnnnnnnnnnnnnnnnnnnnnnnnnnnnnnnnnnnnnnnnnnnnnnnnnnnnnnnnnnnnnnnnnnnnnnnnnnnnnnnnnnnnnnnnnnnnnnnnnnnnnnnnnnnnnnnnnnnnnnnnnnnnnnnnnnnnnnnnnnnnnnnnnnnnnnnnnnnnnnnnnnnnnnnnnnnnnnnnnnnnnnnnnnnnnnnnnnnnnnnnnnnnnnnnnnnnnnnnnnnnnnnnnnnnnnnnnnnnnnnnnnnnnnnnnnnnnnnnnnnnnnnnnnnnnnnnnnnnnnnnnnnnnnnnnnnnnnnnnnnnnnnnnnnnnnnnnnnnnnnnnnnnnnnnnnnnnnnnnnnnnnnnnnnnnnnnnnnnnnnnnnnnnnnnnnnnnnnnnnnnnnnnnnnnnnnnnnnnnnnnnnnnnnnnnnnnnnnnnnnnnnnnnnnnnnnnnnnnnnnnnnnnnnnnnnnnnnnnnnnnnnnnnnnnnnnnnnnnnnnnnnnnnnnnnnnnnnnnnnnnnnnnnnnnnnnnnnnnnnnnnnnnnnnnnnnnnnnnnnnnnnnnnnnnnnnnnnnnnnnnnnnnnnnnnnnnnnnnnnnnnnnnnnnnnnnnnnnnnnnnnnnnnnnnnnnnnnnnnnnnnnnnnnnnnnnnnnnnnnnnnnnnnnnnnnnnnnnnnnnnnnnnnnnnnnnnnnnnnnnnnnnnnnnnnnnnnnnnnnnnnnnnnnnnnnnnnnnnnnnnnnnnnnnnnnnnnnnnnnnnnnnnnnnnnnnnnnnnnnnnnnnnnnnnnnnnnnnnnnnnnnnnnnnnnnnnnnnnnnnnnnnnnnnnnnnnnnnnnnnnnnnnnnnnnnnnnnnnnnnnnnnnnnnnnnnnnnnnnnnnnnnnnnnnnnnnnnnnnnnnnnnnnnnnnnnnnnnnnnnnnnnnnnnnnnnnnnnnnnnnnnnnnnnnnnnnnnnnnnnnnnnnnnnnnnnnnnnnnnnnnnnnnnnnnnnnnnnnnnnnnnnnnnnnnnnnnnnnnnnnnnnnnnnnnnnnnnnnnnnnnnnnnnnnnnnnnnnnnnnnnnnnnnnnnnnnnnnnnnnnnnnnnnnnnnnnnnnnnnnnnnnnnnnnnnnnnnnnnnnnnnnnnnnnnnnnnnnnnnnnnnnnnnnnnnnnnnnnnnnnnnnnnnnnnnnnnnnnnnnnnnnnnnnnnnnnnnnnnnnnnnnnnnnnnnnnnnnnnnnnnnnnnnnnnnnnnnnnnnnnnnnnnnnnnnnnnnnnnnnnnnnnnnnnnnnnnnnnnnnnnnnnnnnnnnnnnnnnnnnnnnnnnnnnnnnnnnnnnnnnnnnnnnnnnnnnnnnnnnnnnnnnnnnnnnnnnnnnnnnnnnnnnnnnnnnnnnnnnnnnnnnnnnnnnnnnnnnnnnnnnnnnnnnnnnnnnnnnnnnnnnnnnnnnnnnnnnnnnnnnnnnnnnnnnnnnnnnnnnnnnnnnnnnnnnnnnnnnnnnnnnnnnnnnnnnnnnnnnnnnnnnnnnnnnnnnnnnnnnnnnnnnnnnnnnnnnnnnnnnnnnnnnnnnnnnnnnnnnnnnnnnnnnnnnnnnnnnnnnnnnnnnnnnnnnnnnnnnnnnnnnnnnnnnnnnnnnnnnnnnnnnnnnnnnnnnnnnnnnnnnnnnnnnnnnnnnnnnnnnnnnnnnnnnnnnnnnnnnnnnnnnnnnnnnnnnnnnnnnnnnnnnnnnnnnnnnnnnnnnnnnnnnnnnnnnnnnnnnnnnnnnnnnnnnnnnnnnnnnnnnnnnnnnnnnnnnnnnnnnnnnnnnnnnnnnnnnnnnnnnnnnnnnnnnnnnnnnnnnnnnnnnnnnnnnnnnnnnnnnnnnnnnnnnnnnnnnnnnnnnnnnnnnnnnnnnnnnnnnnnnnnnnnnnnnnnnnnnnnnnnnnnnnnnnnnnnnnnnnnnnnnnnnnnnnnnnnnnnnnnnnnnnnnnnnnnnnnnnnnnnnnnnnnnnnnnnnnnnnnnnnnnnnnnnnnnnnnnnnnnnnnnnnnnnnnnnnnnnnnnnnnnnnnnnnnnnnnnnnnnnnnnnnnnnnnnnnnnnnnnnnnnnnnnnnnnnnnnnnnnnnnnnnnnnnnnnnnnnnnnnnnnnnnnnnnnnnnnnnnnnnnnnnnnnnnnnnnnnnnnnnnnnnnnnnnnnnnnnnnnnnnnnnnnnnnnnnnnnnnnnnnnnnnnnnnnnnnnnnnnnnnnnnnnnnnnnnnnnnnnnnnnnnnnnnnnnnnnnnnnnnnnnnnnnnnnnnnnnnnnnnnnnnnnnnnnnnnnnnnnnnnnnnnnnnnnnnnnnnnnnnnnnnnnnnnnnnnnnnnnnnnnnnnnnnnnnnnnnnnnnnnnnnnnnnnnnnnnnnnnnnnnnnnnnnnnnnnnnnnnnnnnnnnnnnnnnnnnnnnnnnnnnnnnnnnnnnnnnnnnnnnnnnnnnnnnnnnnnnnnnnnnnnnnnnnnnnnnnnnnnnnnnnnnnnnnnnnnnnnnnnnnnnnnnnnnnnnnnnnnnnnnnnnnnnnnnnnnnnnnnnnnnnnnnnnnnnnnnnnnnnnnnnnnnnnnnnnnnnnnnnnnnnnnnnnnnnnnnnnnnnnnnnnnnnnnnnnnnnnnnnnnnnnnnnnnnnnnnnnnnnnnnnnnnnnnnnnnnnnnnnnnnnnnnnnnnnnnnnnnnnnnnnnnnnnnnnnnnnnnnnnnnnnnnnnnnnnnnnnnnnnnnnnnnnnnnnnnnnnnnnnnnnnnnnnnnnnnnnnnnnnnnnnnnnnnnnnnnnnnnnnnnnnnnnnnnnnnnnnnnnnnnnnnnnnnnnnnnnnnnnnnnnnnnnnnnnnnnnnnnnnnnnnnnnnnnnnnnnnnnnnnnnnnnnnnnnnnnnnnnnnnnnnnnnnnnnnnnnnnnnnnnnnnnnnnnnnnnnnnnnnnnnnnnnnnnnnnnnnnnnnnnnnnnnnnnnnnnnnnnnnnnnnnnnnnnnnnnnnnnnnnnnnnnnnnnnnnnnnnnnnnnnnnnnnnnnnnnnnnnnnnnnnnnnnnnnnnnnnnnnnnnnnnnnnnnnnnnnnnnnnnnnnnnnnnnnnnnnnnnnnnnnnnnnnnnnnnnnnnnnnnnnnnnnnnnnnnnnnnnnnnnnnnnnnnnnnnnnnnnnnnnnnnnnnnnnnnnnnnnnnnnnnnnnnnnnnnnnnnnnnnnnnnnnnnnnnnnnnnnnnnnnnnnnnnnnnnnnnnnnnnnnnnnnnnnnnnnnnnnnnnnnnnnnnnnnnnnnnnnnnnnnnnnnnnnnnnnnnnnnnnnnnnnnnnnnnnnnnnnnnnnnnnnnnnnnnnnnnnnnnnnnnnnnnnnnnnnnnnnnnnnnnnnnnnnnnnnnnnnnnnnnnnnnnnnnnnnnnnnnnnnnnnnnnnnnnnnnnnnnnnnnnnnnnnnnnnnnnnnnnnnnnnnnnnnnnnnnnnnnnnnnnnnnnnnnnnnnnnnnnnnnnnnnnnnnnnnnnnnnnnnnnnnnnnnnnnnnnnnnnnnnnnnnnnnnnnnnnnnnnnnnnnnnnnnnnnnnnnnnnnnnnnnnnnnnnnnnnnnnnnnnnnnnnnnnnnnnnnnnnnnnnnnnnnnnnnnnnnnnnnnnnnnnnnnnnnnnnnnnnnnnnnnnnnnnnnnnnnnnnnnnnnnnnnnnnnnnnnnnnnnnnnnnnnnnnnnnnnnnnnnnnnnnnnnnnnnnnnnnnnnnnnnnnnnnnnnnnnnnnnnnnnnnnnnnnnnnnnnnnnnnnnnnnnnnnnnnnnnnnnnnnnnnnnnnnnnnnnnnnnnnnnnnnnnnnnnnnnnnnnnnnnnnnnnnnnnnnnnnnnnnnnnnnnnnnnnnnnnnnnnnnnnnnnnnnnnnnnnnnnnnnnnnnnnnnnnnnnnnnnnnnnnnnnnnnnnnnnnnnnnnnnnnnnnnnnnnnnnnnnnnnnnnnnnnnnnnnnnnnnnnnnnnnnnnnnnnnnnnnnnnnnnnnnnnnnnnnnnnnnnnnnnnnnnnnnnnnnnnnnnnnnnnnnnnnnnnnnnnnnnnnnnnnnnnnnnnnnnnnnnnnnnnnnnnnnnnnnnnnnnnnnnnnnnnnnnnnnnnnnnnnnnnnnnnnnnnnnnnnnnnnnnnnnnnnnnnnnnnnnnnnnnnnnnnnnnnnnnnnnnnnnnnnnnnnnnnnnnnnnnnnnnnnnnnnnnnnnnnnnnnnnnnnnnnnnnnnnnnnnnnnnnnnnnnnnnnnnnnnnnnnnnnnnnnnnnnnnnnnnnnnnnnnnnnnnnnnnnnnnnnnnnnnnnnnnnnnnnnnnnnnnnnnnnnnnnnnnnnnnnnnnnnnnnnnnnnnnnnnnnnnnnnnnnnnnnnnnnnnnnnnnnnnnnnnnnnnnnnnnnnnnnnnnnnnnnnnnnnnnnnnnnnnnnnnnnnnnnnnnnnnnnnnnnnnnnnnnnnnnnnnnnnnnnnnnnnnnnnnnnnnnnnnnnnnnnnnnnnnnnnnnnnnnnnnnnnnnnnnnnnnnnnnnnnnnnnnnnnnnnnnnnnnnnnnnnnnnnnnnnnnnnnnnnnnnnnnnnnnnnnnnnnnnnnnnnnnnnnnnnnnnnnnnnnnnnnnnnnnnnnnnnnnnnnnnnnnnnnnnnnnnnnnnnnnnnnnnnnnnnnnnnnnnnnnnnnnnnnnnnnnnnnnnnnnnnnnnnnnnnnnnnnnnnnnnnnnnnnnnnnnnnnnnnnnnnnnnnnnnnnnnnnnnnnnnnnnnnnnnnnnnnnnnnnnnnnnnnnnnnnnnnnnnnnnnnnnnnnnnnnnnnnnnnnnnnnnnnnnnnnnnnnnnnnnnnnnnnnnnnnnnnnnnnnnnnnnnnnnnnnnnnnnnnnnnnnnnnnnnnnnnnnnnnnnnnnnnnnnnnnnnnnnnnnnnnnnnnnnnnnnnnnnnnnnnnnnnnnnnnnnnnnnnnnnnnnnnnnnnnnnnnnnnnnnnnnnnnnnnnnnnnnnnnnnnnnnnnnnnnnnnnnnnnnnnnnnnnnnnnnnnnnnnnnnnnnnnnnnnnnnnnnnnnnnnnnnnnnnnnnnnnnnnnnnnnnnnnnnnnnnnnnnnnnnnnnnnnnnnnnnnnnnnnnnnnnnnnnnnnnnnnnnnnnnnnnnnnnnnnnnnnnnnnnnnnnnnnnnnnnnnnnnnnnnnnnnnnnnnnnnnnnnnnnnnnnnnnnnnnnnnnnnnnnnnnnnnnnnnnnnnnnnnnnnnnnnnnnnnnnnnnnnnnnnnnnnnnnnnnnnnnnnnnnnnnnnnnnnnnnnnnnnnnnnnnnnnnnnnnnnnnnnnnnnnnnnnnnnnnnnnnnnnnnnnnnnnnnnnnnnnnnnnnnnnnnnnnnnnnnnnnnnnnnnnnnnnnnnnnnnnnnnnnnnnnnnnnnnnnnnnnnnnnnnnnnnnnnnnnnnnnnnnnnnnnnnnnnnnnnnnnnnnnnnnnnnnnnnnnnnnnnnnnnnnnnnnnnnnnnnnnnnnnnnnnnnnnnnnnnnnnnnnnnnnnnnnnnnnnnnnnnnnnnnnnnnnnnnnnnnnnnnnnnnnnnnnnnnnnnnnnnnnnnnnnnnnnnnnnnnnnnnnnnnnnnnnnnnnnnnnnnnnnnnnnnnnnnnnnnnnnnnnnnnnnnnnnnnnnnnnnnnnnnnnnnnnnnnnnnnnnnnnnnnnnnnnnnnnnnnnnnnnnnnnnnnnnnnnnnnnnnnnnnnnnnnnnnnnnnnnnnnnnnnnnnnnnnnnnnnnnnnnnnnnnnnnnnnnnnnnnnnnnnnnnnnnnnnnnnnnnnnnnnnnnnnnnnnnnnnnnnnnnnnnnnnnnnnnnnnnnnnnnnnnnnnnnnnnnnnnnnnnnnnnnnnnnnnnnnnnnnnnnnnnnnnnnnnnnnnnnnnnnnnnnnnnnnnnnnnnnnnnnnnnnnnnnnnnnnnnnnnnnnnnnnnnnnnnnnnnnnnnnnnnnnnnnnnnnnnnnnnnnnnnnnnnnnnnnnnnnnnnnnnnnnnnnnnnnnnnnnnnnnnnnnnnnnnnnnnnnnnnnnnnnnnnnnnnnnnnnnnnnnnnnnnnnnnnnnnnnnnnnnnnnnnnnnnnnnnnnnnnnnnnnnnnnnnnnnnnnnnnnnnnnnnnnnnnnnnnnnnnnnnnnnnnnnnnnnnnnnnnnnnnnnnnnnnnnnnnnnnnnnnnnnnnnnnnnnnnnnnnnnnnnnnnnnnnnnnnnnnnnnnnnnnnnnnnnnnnnnnnnnnnnnnnnnnnnnnnnnnnnnnnnnnnnnnnnnnnnnnnnnnnnnnnnnnnnnnnnnnnnnnnnnnnnnnnnnnnnnnnnnnnnnnnnnnnnnnnnnnnnnnnnnnnnnnnnnnnnnnnnnnnnnnnnnnnnnnnnnnnnnnnnnnnnnnnnnnnnnnnnnnnnnnnnnnnnnnnnnnnnnnnnnnnnnnnnnnnnnnnnnnnnnnnnnnnnnnnnnnnnnnnnnnnnnnnnnnnnnnnnnnnnnnnnnnnnnnnnnnnnnnnnnnnnnnnnnnnnnnnnnnnnnnnnnnnnnnnnnnnnnnnnnnnnnnnnnnnnnnnnnnnnnnnnnnnnnnnnnnnnnnnnnnnnnnnnnnnnnnnnnnnnnnnnnnnnnnnnnnnnnnnnnnnnnnnnnnnnnnnnnnnnnnnnnnnnnnnnnnnnnnnnnnnnnnnnnnnnnnnnnnnnnnnnnnnnnnnnnnnnnnnnnnnnnnnnnnnnnnnnnnnnnnnnnnnnnnnnnnnnnnnnnnnnnnnnnnnnnnnnnnnnnnnnnnnnnnnnnnnnnnnnnnnnnnnnnnnnnnnnnnnnnnnnnnnnnnnnnnnnnnnnnnnnnnnnnnnnnnnnnnnnnnnnnnnnnnnnnnnnnnnnnnnnnnnnnnnnnnnnnnnnnnnnnnnnnnnnnnnnnnnnnnnnnnnnnnnnnnnnnnnnnnnnnnnnnnnnnnnnnnnnnnnnnnnnnnnnnnnnnnnnnnnnnnnnnnnnnnnnnnnnnnnnnnnnnnnnnnnnnnnnnnnnnnnnnnnnnnnnnnnnnnnnnnnnnnnnnnnnnnnnnnnnnnnnnnnnnnnnnnnnnnnnnnnnnnnnnnnnnnnnnnnnnnnnnnnnnnnnnnnnnnnnnnnnnnnnnnnnnnnnnnnnnnnnnnnnnnnnnnnnnnnnnnnnnnnnnnnnnnnnnnnnnnnnnnnnnnnnnnnnnnnnnnnnnnnnnnnnnnnnnnnnnnnnnnnnnnnnnnnnnnnnnnnnnnnnnnnnnnnnnnnnnnnnnnnnnnnnnnnnnnnnnnnnnnnnnnnnnnnnnnnnnnnnnnnnnnnnnnnnnnnnnnnnnnnnnnnnnnnnnnnnnnnnnnnnnnnnnnnnnnnnnnnnnnnnnnnnnnnnnnnnnnnnnnnnnnnnnnnnnnnnnnnnnnnnnnnnnnnnnnnnnnnnnnnnnnnnnnnnnnnnnnnnnnnnnnnnnnnnnnnnnnnnnnnnnnnnnnnnnnnnnnnnnnnnnnnnnnnnnnnnnnnnnnnnnnnnnnnnnnnnnnnnnnnnnnnnnnnnnnnnnnnnnnnnnnnnnnnnnnnnnnnnnnnnnnnnnnnnnnnnnnnnnnnnnnnnnnnnnnnnnnnnnnnnnnnnnnnnnnnnnnnnnnnnnnnnnnnnnnnnnnnnnnnnnnnnnnnnnnnnnnnnnnnnnnnnnnnnnnnnnnnnnnnnnnnnnnnnnnnnnnnnnnnnnnnnnnnnnnnnnnnnnnnnnnnnnnnnnnnnnnnnnnnnnnnnnnnnnnnnnnnnnnnnnnnnnnnnnnnnnnnnnnnnnnnnnnnnnnnnnnnnnnnnnnnnnnnnnnnnnnnnnnnnnnnnnnnnnnnnnnnnnnnnnnnnnnnnnnnnnnnnnnnnnnnnnnnnnnnnnnnnnnnnnnnnnnnnnnnnnnnnnnnnnnnnnnnnnnnnnnnnnnnnnnnnnnnnnnnnnnnnnnnnnnnnnnnnnnnnnnnnnnnnnnnnnnnnnnnnnnnnnnnnnnnnnnnnnnnnnnnnnnnnnnnnnnnnnnnnnnnnnnnnnnnnnnnnnnnnnnnnnnnnnnnnnnnnnnnnnnnnnnnnnnnnnnnnnnnnnnnnnnnnnnnnnnnnnnnnnnnnnnnnnnnnnnnnnnnnnnnnnnnnnnnnnnnnnnnnnnnnnnnnnnnnnnnnnnnnnnnnnnnnnnnnnnnnnnnnnnnnnnnnnnnnnnnnnnnnnnnnnnnnnnnnnnnnnnnnnnnnnnnnnnnnnnnnnnnnnnnnnnnnnnnnnnnnnnnnnnnnnnnnnnnnnnnnnnnnnnnnnnnnnnnnnnnnnnnnnnnnnnnnnnnnnnnnnnnnnnnnnnnnnnnnnnnnnnnnnnnnnnnnnnnnnnnnnnnnnnnnnnnnnnnnnnnnnnnnnnnnnnnnnnnnnnnnnnnnnnnnnnnnnnnnnnnnnnnnnnnnnnnnnnnnnnnnnnnnnnnnnnnnnnnnnnnnnnnnnnnnnnnnnnnnnnnnnnnnnnnnnnnnnnnnnnnnnnnnnnnnnnnnnnnnnnnnnnnnnnnnnnnnnnnnnnnnnnnnnnnnnnnnnnnnnnnnnnnnnnnnnnnnnnnnnnnnnnnnnnnnnnnnnnnnnnnnnnnnnnnnnnnnnnnnnnnnnnnnnnnnnnnnnnnnnnnnnnnnnnnnnnnnnnnnnnnnnnnnnnnnnnnnnnnnnnnnnnnnnnnnnnnnnnnnnnnnnnnnnnnnnnnnnnnnnnnnnnnnnnnnnnnnnnnnnnnnnnnnnnnnnnnnnnnnnnnnnnnnnnnnnnnnnnnnnnnnnnnnnnnnnnnnnnnnnnnnnnnnnnnnnnnnnnnnnnnnnnnnnnnnnnnnnnnnnnnnnnnnnnnnnnnnnnnnnnnnnnnnnnnnnnnnnnnnnnnnnnnnnnnnnnnnnnnnnnnnnnnnnnnnnnnnnnnnnnnnnnnnnnnnnnnnnnnnnnnnnnnnnnnnnnnnnnnnnnnnnnnnnnnnnnnnnnnnnnnnnnnnnnnnnnnnnnnnnnnnnnnnnnnnnnnnnnnnnnnnnnnnnnnnnnnnnnnnnnnnnnnnnnnnnnnnnnnnnnnnnnnnnnnnnnnnnnnnnnnnnnnnnnnnnnnnnnnnnnnnnnnnnnnnnnnnnnnnnnnnnnnnnnnnnnnnnnnnnnnnnnnnnnnnnnnnnnnnnnnnnnnnnnnnnnnnnnnnnnnnnnnnnnnnnnnnnnnnnnnnnnnnnnnnnnnnnnnnnnnnnnnnnnnnnnnnnnnnnnnnnnnnnnnnnnnnnnnnnnnnnnnnnnnnnnnnnnnnnnnnnnnnnnnnnnnnnnnnnnnnnnnnnnnnnnnnnnnnnnnnnnnnnnnnnnnnnnnnnnnnnnnnnnnnnnnnnnnnnnnnnnnnnnnnnnnnnnnnnnnnnnnnnnnnnnnnnnnnnnnnnnnnnnnnnnnnnnnnnnnnnnnnnnnnnnnnnnnnnnnnnnnnnnnnnnnnnnnnnnnnnnnnnnnnnnnnnnnnnnnnnnnnnnnnnnnnnnnnnnnnnnnnnnnnnnnnnnnnnnnnnnnnnnnnnnnnnnnnnnnnnnnnnnnnnnnnnnnnnnnnnnnnnnnnnnnnnnnnnnnnnnnnnnnnnnnnnnnnnnnnnnnnnnnnnnnnnnnnnnnnnnnnnnnnnnnnnnnnnnnnnnnnnnnnnnnnnnnnnnnnnnnnnnnnnnnnnnnnnnnnnnnnnnnnnnnnnnnnnnnnnnnnnnnnnnnnnnnnnnnnnnnnnnnnnnnnnnnnnnnnnnnnnnnnnnnnnnnnnnnnnnnnnnnnnnnnnnnnnnnnnnnnnnnnnnnnnnnnnnnnnnnnnnnnnnnnnnnnnnnnnnnnnnnnnnnnnnnnnnnnnnnnnnnnnnnnnnnnnnnnnnnnnnnnnnnnnnnnnnnnnnnnnnnnnnnnnnnnnnnnnnnnnnnnnnnnnnnnnnnnnnnnnnnnnnnnnnnnnnnnnnnnnnnnnnnnnnnnnnnnnnnnnnnnnnnnnnnnnnnnnnnnnnnnnnnnnnnnnnnnnnnnnnnnnnnnnnnnnnnnnnnnnnnnnnnnnnnnnnnnnnnnnnnnnnnnnnnnnnnnnnnnnnnnnnnnnnnnnnnnnnnnnnnnnnnnnnnnnnnnnnnnnnnnnnnnnnnnnnnnnnnnnnnnnnnnnnnnnnnnnnnnnnnnnnnnnnnnnnnnnnnnnnnnnnnnnnnnnnnnnnnnnnnnnnnnnnnnnnnnnnnnnnnnnnnnnnnnnnnnnnnnnnnnnnnnnnnnnnnnnnnnnnnnnnnnnnnnnnnnnnnnnnnnnnnnnnnnnnnnnnnnnnnnnnnnnnnnnnnnnnnnnnnnnnnnnnnnnnnnnnnnnnnnnnnnnnnnnnnnnnnnnnnnnnnnnnnnnnnnnnnnnnnnnnnnnnnnnnnnnnnnnnnnnnnnnnnnnnnnnnnnnnnnnnnnnnnnnnnnnnnnnnnnnnnnnnnnnnnnnnnnnnnnnnnnnnnnnnnnnnnnnnnnnnnnnnnnnnnnnnnnnnnnnnnnnnnnnnnnnnnnnnnnnnnnnnnnnnnnnnnnnnnnnnnnnnnnnnnnnnnnnnnnnnnnnnnnnnnnnnnnnnnnnnnnnnnnnnnnnnnnnnnnnnnnnnnnnnnnnnnnnnnnnnnnnnnnnnnnnnnnnnnnnnnnnnnnnnnnnnnnnnnnnnnnnnnnnnnnnnnnnnnnnnnnnnnnnnnnnnnnnnnnnnnnnnnnnnnnnnnnnnnnnnnnnnnnnnnnnnnnnnnnnnnnnnnnnnnnnnnnnnnnnnnnnnnnnnnnnnnnnnnnnnnnnnnnnnnnnnnnnnnnnnnnnnnnnnnnnnnnnnnnnnnnnnnnnnnnnnnnnnnnnnnnnnnnnnnnnnnnnnnnnnnnnnnnnnnnnnnnnnnnnnnnnnnnnnnnnnnnnnnnnnnnnnnnnnnnnnnnnnnnnnnnnnnnnnnnnnnnnnnnnnnnnnnnnnnnnnnnnnnnnnnnnnnnnnnnnnnnnnnnnnnnnnnnnnnnnnnnnnnnnnnnnnnnnnnnnnnnnnnnnnnnnnnnnnnnnnnnnnnnnnnnnnnnnnnnnnnnnnnnnnnnnnnnnnnnnnnnnnnnnnnnnnnnnnnnnnnnnnnnnnnnnnnnnnnnnnnnnnnnnnnnnnnnnnnnnnnnnnnnnnnnnnnnnnnnnnnnnnnnnnnnnnnnnnnnnnnnnnnnnnnnnnnnnnnnnnnnnnnnnnnnnnnnnnnnnnnnnnnnnnnnnnnnnnnnnnnnnnnnnnnnnnnnnnnnnnnnnnnnnnnnnnnnnnnnnnnnnnnnnnnnnnnnnnnnnnnnnnnnnnnnnnnnnnnnnnnnnnnnnnnnnnnnnnnnnnnnnnnnnnnnnnnnnnnnnnnnnnnnnnnnnnnnnnnnnnnnnnnnnnnnnnnnnnnnnnnnnnnnnnnnnnnnnnnnnnnnnnnnnnnnnnnnnnnnnnnnnnnnnnnnnnnnnnnnnnnnnnnnnnnnnnnnnnnnnnnnnnnnnnnnnnnnnnnnnnnnnnnnnnnnnnnnnnnnnnnnnnnnnnnnnnnnnnnnnnnnnnnnnnnnnnnnnnnnnnnnnnnnnnnnnnnnnnnnnnnnnnnnnnnnnnnnnnnnnnnnnnnnnnnnnnnnnnnnnnnnnnnnnnnnnnnnnnnnnnnnnnnnnnnnnnnnnnnnnnnnnnnnnnnnnnnnnnnnnnnnnnnnnnnnnnnnnnnnnnnnnnnnnnnnnnnnnnnnnnnnnnnnnnnnnnnnnnnnnnnnnnnnnnnnnnnnnnnnnnnnnnnnnnnnnnnnnnnnnnnnnnnnnnnnnnnnnnnnnnnnnnnnnnnnnnnnnnnnnnnnnnnnnnnnnnnnnnnnnnnnnnnnnnnnnnnnnnnnnnnnnnnnnnnnnnnnnnnnnnnnnnnnnnnnnnnnnnnnnnnnnnnnnnnnnnnnnnnnnnnnnnnnnnnnnnnnnnnnnnnnnnnnnnnnnnnnnnnnnnnnnnnnnnnnnnnnnnnnnnnnnnnnnnnnnnnnnnnnnnnnnnnnnnnnnnnnnnnnnnnnnnnnnnnnnnnnnnnnnnnnnnnnnnnnnnnnnnnnnnnnnnnnnnnnnnnnnnnnnnnnnnnnnnnnnnnnnnnnnnnnnnnnnnnnnnnnnnnnnnnnnnnnnnnnnnnnnnnnnnnnnnnnnnnnnnnnnnnnnnnnnnnnnnnnnnnnnnnnnnnnnnnnnnnnnnnnnnnnnnnnnnnnnnnnnnnnnnnnnnnnnnnnnnnnnnnnnnnnnnnnnnnnnnnnnnnnnnnnnnnnnnnnnnnnnnnnnnnnnnnnnnnnnnnnnnnnnnnnnnnnnnnnnnnnnnnnnnnnnnnnnnnnnnnnnnnnnnnnnnnnnnnnnnnnnnnnnnnnnnnnnnnnnnnnnnnnnnnnnnnnnnnnnnnnnnnnnnnnnnnnnnnnnnnnnnnnnnnnnnnnnnnnnnnnnnnnnnnnnnnnnnnnnnnnnnnnnnnnnnnnnnnnnnnnnnnnnnnnnnnnnnnnnnnnnnnnnnnnnnnnnnnnnnnnnnnnnnnnnnnnnnnnnnnnnnnnnnnnnnnnnnnnnnnnnnnnnnnnnnnnnnnnnnnnnnnnnnnnnnnnnnnnnnnnnnnnnnnnnnnnnnnnnnnnnnnnnnnnnnnnnnnnnnnnnnnnnnnnnnnnnnnnnnnnnnnnnnnnnnnnnnnnnnnnnnnnnnnnnnnnnnnnnnnnnnnnnnnnnnnnnnnnnnnnnnnnnnnnnnnnnnnnnnnnnnnnnnnnnnnnnnnnnnnnnnnnnnnnnnnnnnnnnnnnnnnnnnnnnnnnnnnnnnnnnnnnnnnnnnnnnnnnnnnnnnnnnnnnnnnnnnnnnnnnnnnnnnnnnnnnnnnnnnnnnnnnnnnnnnnnnnnnnnnnnnnnnnnnnnnnnnnnnnnnnnnnnnnnnnnnnnnnnnnnnnnnnnnnnnnnnnnnnnnnnnnnnnnnnnnnnnnnnnnnnnnnnnnnnnnnnnnnnnnnnnnnnnnnnnnnnnnnnnnnnnnnnnnnnnnnnnnnnnnnnnnnnnnnnnnnnnnnnnnnnnnnnnnnnnnnnnnnnnnnnnnnnnnnnnnnnnnnnnnnnnnnnnnnnnnnnnnnnnnnnnnnnnnnnnnnnnnnnnnnnnnnnnnnnnnnnnnnnnnnnnnnnnnnnnnnnnnnnnnnnnnnnnnnnnnnnnnnnnnnnnnnnnnnnnnnnnnnnnnnnnnnnnnnnnnnnnnnnnnnnnnnnnnnnnnnnnnnnnnnnnnnnnnnnnnnnnnnnnnnnnnnnnnnnnnnnnnnnnnnnnnnnnnnnnnnnnnnnnnnnnnnnnnnnnnnnnnnnnnnnnnnnnnnnnnnnnnnnnnnnnnnnnnnnnnnnnnnnnnnnnnnnnnnnnnnnnnnnnnnnnnnnnnnnnnnnnnnnnnnnnnnnnnnnnnnnnnnnnnnnnnnnnnnnnnnnnnnnnnnnnnnnnnnnnnnnnnnnnnnnnnnnnnnnnnnnnnnnnnnnnnnnnnnnnnnnnnnnnnnnnnnnnnnnnnnnnnnnnnnnnnnnnnnnnnnnnnnnnnnnnnnnnnnnnnnnnnnnnnnnnnnnnnnnnnnnnnnnnnnnnnnnnnnnnnnnnnnnnnnnnnnnnnnnnnnnnnnnnnnnnnnnnnnnnnnnnnnnnnnnnnnnnnnnnnnnnnnnnnnnnnnnnnnnnnnnnnnnnnnnnnnnnnnnnnnnnnnnnnnnnnnnnnnnnnnnnnnnnnnnnnnnnnnnnnnnnnnnnnnnnnnnnnnnnnnnnnnnnnnnnnnnnnnnnnnnnnnnnnnnnnnnnnnnnnnnnnnnnnnnnnnnnnnnnnnnnnnnnnnnnnnnnnnnnnnnnnnnnnnnnnnnnnnnnnnnnnnnnnnnnnnnnnnnnnnnnnnnnnnnnnnnnnnnnnnnnnnnnnnnnnnnnnnnnnnnnnnnnnnnnnnnnnnnnnnnnnnnnnnnnnnnnnnnnnnnnnnnnnnnnnnnnnnnnnnnnnnnnnnnnnnnnnnnnnnnnnnnnnnnnnnnnnnnnnnnnnnnnnnnnnnnnnnnnnnnnnnnnnnnnnnnnnnnnnnnnnnnnnnnnnnnnnnnnnnnnnnnnnnnnnnnnnnnnnnnnnnnnnnnnnnnnnnnnnnnnnnnnnnnnnnnnnnnnnnnnnnnnnnnnnnnnnnnnnnnnnnnnnnnnnnnnnnnnnnnnnnnnnnnnnnnnnnnnnnnnnnnnnnnnnnnnnnnnnnnnnnnnnnnnnnnnnnnnnnnnnnnnnnnnnnnnnnnnnnnnnnnnnnnnnnnnnnnnnnnnnnnnnnnnnnnnnnnnnnnnnnnnnnnnnnnnnnnnnnnnnnnnnnnnnnnnnnnnnnnnnnnnnnnnnnnnnnnnnnnnnnnnnnnnnnnnnnnnnnnnnnnnnnnnnnnnnnnnnnnnnnnnnnnnnnnnnnnnnnnnnnnnnnnnnnnnnnnnnnnnnnnnnnnnnnnnnnnnnnnnnnnnnnnnnnnnnnnnnnnnnnnnnnnnnnnnnnnnnnnnnnnnnnnnnnnnnnnnnnnnnnnnnnnnnnnnnnnnnnnnnnnnnnnnnnnnnnnnnnnnnnnnnnnnnnnnnnnnnnnnnnnnnnnnnnnnnnnnnnnnnnnnnnnnnnnnnnnnnnnnnnnnnnnnnnnnnnnnnnnnnnnnnnnnnnnnnnnnnnnnnnnnnnnnnnnnnnnnnnnnnnnnnnnnnnnnnnnnnnnnnnnnnnnnnnnnnnnnnnnnnnnnnnnnnnnnnnnnnnnnnnnnnnnnnnnnnnnnnnnnnnnnnnnnnnnnnnnnnnnnnnnnnnnnnnnnnnnnnnnnnnnnnnnnnnnnnnnnnnnnnnnnnnnnnnnnnnnnnnnnnnnnnnnnnnnnnnnnnnnnnnnnnnnnnnnnnnnnnnnnnnnnnnnnnnnnnnnnnnnnnnnnnnnnnnnnnnnnnnnnnnnnnnnnnnnnnnnnnnnnnnnnnnnnnnnnnnnnnnnnnnnnnnnnnnnnnnnnnnnnnnnnnnnnnnnnnnnnnnnnnnnnnnnnnnnnnnnnnnnnnnnnnnnnnnnnnnnnnnnnnnnnnnnnnnnnnnnnnnnnnnnnnnnnnnnnnnnnnnnnnnnnnnnnnnnnnnnnnnnnnnnnnnnnnnnnnnnnnnnnnnnnnnnnnnnnnnnnnnnnnnnnnnnnnnnnnnnnnnnnnnnnnnnnnnnnnnnnnnnnnnnnnnnnnnnnnnnnnnnnnnnnnnnnnnnnnnnnnnnnnnnnnnnnnnnnnnnnnnnnnnnnnnnnnnnnnnnnnnnnnnnnnnnnnnnnnnnnnnnnnnnnnnnnnnnnnnnnnnnnnnnnnnnnnnnnnnnnnnnnnnnnnnnnnnnnnnnnnnnnnnnnnnnnnnnnnnnnnnnnnnnnnnnnnnnnnnnnnnnnnnnnnnnnnnnnnnnnnnnnnnnnnnnnnnnnnnnnnnnnnnnnnnnnnnnnnnnnnnnnnnnnnnnnnnnnnnnnnnnnnnnnnnnnnnnnnnnnnnnnnnnnnnnnnnnnnnnnnnnnnnnnnnnnnnnnnnnnnnnnnnnnnnnnnnnnnnnnnnnnnnnnnnnnnnnnnnnnnnnnnnnnnnnnnnnnnnnnnnnnnnnnnnnnnnnnnnnnnnnnnnnnnnnnnnnnnnnnnnnnnnnnnnnnnnnnnnnnnnnnnnnnnnnnnnnnnnnnnnnnnnnnnnnnnnnnnnnnnnnnnnnnnnnnnnnnnnnnnnnnnnnnnnnnnnnnnnnnnnnnnnnnnnnnnnnnnnnnnnnnnnnnnnnnnnnnnnnnnnnnnnnnnnnnnnnnnnnnnnnnnnnnnnnnnnnnnnnnnnnnnnnnnnnnnnnnnnnnnnnnnnnnnnnnnnnnnnnnnnnnnnnnnnnnnnnnnnnnnnnnnnnnnnnnnnnnnnnnnnnnnnnnnnnnnnnnnnnnnnnnnnnnnnnnnnnnnnnnnnnnnnnnnnnnnnnnnnnnnnnnnnnnnnnnnnnnnnnnnnnnnnnnnnnnnnnnnnnnnnnnnnnnnnnnnnnnnnnnnnnnnnnnnnnnnnnnnnnnnnnnnnnnnnnnnnnnnnnnnnnnnnnnnnnnnnnnnnnnnnnnnnnnnnnnnnnnnnnnnnnnnnnnnnnnnnnnnnnnnnnnnnnnnnnnnnnnnnnnnnnnnnnnnnnnnnnnnnnnnnnnnnnnnnnnnnnnnnnnnnnnnnnnnnnnnnnnnnnnnnnnnnnnnnnnnnnnnnnnnnnnnnnnnnnnnnnnnnnnnnnnnnnnnnnnnnnnnnnnnnnnnnnnnnnnnnnnnnnnnnnnnnnnnnnnnnnnnnnnnnnnnnnnnnnnnnnnnnnnnnnnnnnnnnnnnnnnnnnnnnnnnnnnnnnnnnnnnnnnnnnnnnnnnnnnnnnnnnnnnnnnnnnnnnnnnnnnnnnnnnnnnnnnnnnnnnnnnnnnnnnnnnnnnnnnnnnnnnnnnnnnnnnnnnnnnnnnnnnnnnnnnnnnnnnnnnnnnnnnnnnnnnnnnnnnnnnnnnnnnnnnnnnnnnnnnnnnnnnnnnnnnnnnnnnnnnnnnnnnnnnnnnnnnnnnnnnnnnnnnnnnnnnnnnnnnnnnnnnnnnnnnnnnnnnnnnnnnnnnnnnnnnnnnnnnnnnnnnnnnnnnnnnnnnnnnnnnnnnnnnnnnnnnnnnnnnnnnnnnnnnnnnnnnnnnnnnnnnnnnnnnnnnnnnnnnnnnnnnnnnnnnnnnnnnnnnnnnnnnnnnnnnnnnnnnnnnnnnnnnnnnnnnnnnnnnnnnnnnnnnnnnnnnnnnnnnnnnnnnnnnnnnnnnnnnnnnnnnnnnnnnnnnnnnnnnnnnnnnnnnnnnnnnnnnnnnnnnnnnnnnnnnnnnnnnnnnnnnnnnnnnnnnnnnnnnnnnnnnnnnnnnnnnnnnnnnnnnnnnnnnnnnnnnnnnnnnnnnnnnnnnnnnnnnnnnnnnnnnnnnnnnnnnnnnnnnnnnnnnnnnnnnnnnnnnnnnnnnnnnnnnnnnnnnnnnnnnnnnnnnnnnnnnnnnnnnnnnnnnnnnnnnnnnnnnnnnnnnnnnnnnnnnnnnnnnnnnnnnnnnnnnnnnnnnnnnnnnnnnnnnnnnnnnnnnnnnnnnnnnnnnnnnnnnnnnnnnnnnnnnnnnnnnnnnnnnnnnnnnnnnnnnnnnnnnnnnnnnnnnnnnnnnnnnnnnnnnnnnnnnnnnnnnnnnnnnnnnnnnnnnnnnnnnnnnnnnnnnnnnnnnnnnnnnnnnnnnnnnnnnnnnnnnnnnnnnnnnnnnnnnnnnnnnnnnnnnnnnnnnnnnnnnnnnnnnnnnnnnnnnnnnnnnnnnnnnnnnnnnnnnnnnnnnnnnnnnnnnnnnnnnnnnnnnnnnnnnnnnnnnnnnnnnnnnnnnnnnnnnnnnnnnnnnnnnnnnnnnnnnnnnnnnnnnnnnnnnnnnnnnnnnnnnnnnnnnnnnnnnnnnnnnnnnnnnnnnnnnnnnnnnnnnnnnnnnnnnnnnnnnnnnnnnnnnnnnnnnnnnnnnnnnnnnnnnnnnnnnnnnnnnnnnnnnnnnnnnnnnnnnnnnnnnnnnnnnnnnnnnnnnnnnnnnnnnnnnnnnnnnnnnnnnnnnnnnnnnnnnnnnnnnnnnnnnnnnnnnnnnnnnnnnnnnnnnnnnnnnnnnnnnnnnnnnnnnnnnnnnnnnnnnnnnnnnnnnnnnnnnnnnnnnnnnnnnnnnnnnnnnnnnnnnnnnnnnnnnnnnnnnnnnnnnnnnnnnnnnnnnnnnnnnnnnnnnnnnnnnnnnnnnnnnnnnnnnnnnnnnnnnnnnnnnnnnnnnnnnnnnnnnnnnnnnnnnnnnnnnnnnnnnnnnnnnnnnnnnnnnnnnnnnnnnnnnnnnnnnnnnnnnnnnnnnnnnnnnnnnnnnnnnnnnnnnnnnnnnnnnnnnnnnnnnnnnnnnnnnnnnnnnnnnnnnnnnnnnnnnnnnnnnnnnnnnnnnnnnnnnnnnnnnnnnnnnnnnnnnnnnnnnnnnnnnnnnnnnnnnnnnnnnnnnnnnnnnnnnnnnnnnnnnnnnnnnnnnnnnnnnnnnnnnnnnnnnnnnnnnnnnnnnnnnnnnnnnnnnnnnnnnnnnnnnnnnnnnnnnnnnnnnnnnnnnnnnnnnnnnnnnnnnnnnnnnnnnnnnnnnnnnnnnnnnnnnnnnnnnnnnnnnnnnnnnnnnnnnnnnnnnnnnnnnnnnnnnnnnnnnnnnnnnnnnnnnnnnnnnnnnnnnnnnnnnnnnnnnnnnnnnnnnnnnnnnnnnnnnnnnnnnnnnnnnnnnnnnnnnnnnnnnnnnnnnnnnnnnnnnnnnnnnnnnnnnnnnnnnnnnnnnnnnnnnnnnnnnnnnnnnnnnnnnnnnnnnnnnnnnnnnnnnnnnnnnnnnnnnnnnnnnnnnnnnnnnnnnnnnnnnnnnnnnnnnnnnnnnnnnnnnnnnnnnnnnnnnnnnnnnnnnnnnnnnnnnnnnnnnnnnnnnnnnnnnnnnnnnnnnnnnnnnnnnnnnnnnnnnnnnnnnnnnnnnnnnnnnnnnnnnnnnnnnnnnnnnnnnnnnnnnnnnnnnnnnnnnnnnnnnnnnnnnnnnnnnnnnnnnnnnnnnnnnnnnnnnnnnnnnnnnnnnnnnnnnnnnnnnnnnnnnnnnnnnnnnnnnnnnnnnnnnnnnnnnnnnnnnnnnnnnnnnnnnnnnnnnnnnnnnnnnnnnnnnnnnnnnnnnnnnnnnnnnnnnnnnnnnnnnnnnnnnnnnnnnnnnnnnnnnnnnnnnnnnnnnnnnnnnnnnnnnnnnnnnnnnnnnnnnnnnnnnnnnnnnnnnnnnnnnnnnnnnnnnnnnnnnnnnnnnnnnnnnnnnnnnnnnnnnnnnnnnnnnnnnnnnnnnnnnnnnnnnnnnnnnnnnnnnnnnnnnnnnnnnnnnnnnnnnnnnnnnnnnnnnnnnnnnnnnnnnnnnnnnnnnnnnnnnnnnnnnnnnnnnnnnnnnnnnnnnnnnnnnnnnnnnnnnnnnnnnnnnnnnnnnnnnnnnnnnnnnnnnnnnnnnnnnnnnnnnnnnnnnnnnnnnnnnnnnnnnnnnnnnnnnnnnnnnnnnnnnnnnnnnnnnnnnnnnnnnnnnnnnnnnnnnnnnnnnnnnnnnnnnnnnnnnnnnnnnnnnnnnnnnnnnnnnnnnnnnnnnnnnnnnnnnnnnnnnnnnnnnnnnnnnnnnnnnnnnnnnnnnnnnnnnnnnnnnnnnnnnnnnnnnnnnnnnnnnnnnnnnnnnnnnnnnnnnnnnnnnnnnnnnnnnnnnnnnnnnnnnnnnnnnnnnnnnnnnnnnnnnnnnnnnnnnnnnnnnnnnnnnnnnnnnnnnnnnnnnnnnnnnnnnnnnnnnnnnnnnnnnnnnnnnnnnnnnnnnnnnnnnnnnnnnnnnnnnnnnnnnnnnnnnnnnnnnnnnnnnnnnnnnnnnnnnnnnnnnnnnnnnnnnnnnnnnnnnnnnnnnnnnnnnnnnnnnnnnnnnnnnnnnnnnnnnnnnnnnnnnnnnnnnnnnnnnnnnnnnnnnnnnnnnnnnnnnnnnnnnnnnnnnnnnnnnnnnnnnnnnnnnnnnnnnnnnnnnnnnnnnnnnnnnnnnnnnnnnnnnnnnnnnnnnnnnnnnnnnnnnnnnnnnnnnnnnnnnnnnnnnnnnnnnnnnnnnnnnnnnnnnnnnnnnnnnnnnnnnnnnnnnnnnnnnnnnnnnnnnnnnnnnnnnnnnnnnnnnnnnnnnnnnnnnnnnnnnnnnnnnnnnnnnnnnnnnnnnnnnnnnnnnnnnnnnnnnnnnnnnnnnnnnnnnnnnnnnnnnnnnnnnnnnnnnnnnnnnnnnnnnnnnnnnnnnnnnnnnnnnnnnnnnnnnnnnnnnnnnnnnnnnnnnnnnnnnnnnnnnnnnnnnnnnnnnnnnnnnnnnnnnnnnnnnnnnnnnnnnnnnnnnnnnnnnnnnnnnnnnnnnnnnnnnnnnnnnnnnnnnnnnnnnnnnnnnnnnnnnnnnnnnnnnnnnnnnnnnnnnnnnnnnnnnnnnnnnnnnnnnnnnnnnnnnnnnnnnnnnnnnnnnnnnnnnnnnnnnnnnnnnnnnnnnnnnnnnnnnnnnnnnnnnnnnnnnnnnnnnnnnnnnnnnnnnnnnnnnnnnnnnnnnnnnnnnnnnnnnnnnnnnnnnnnnnnnnnnnnnnnnnnnnnnnnnnnnnnnnnnnnnnnnnnnnnnnnnnnnnnnnnnnnnnnnnnnnnnnnnnnnnnnnnnnnnnnnnnnnnnnnnnnnnnnnnnnnnnnnnnnnnnnnnnnnnnnnnnnnnnnnnnnnnnnnnnnnnnnnnnnnnnnnnnnnnnnnnnnnnnnnnnnnnnnnnnnnnnnnnnnnnnnnnnnnnnnnnnnnnnnnnnnnnnnnnnnnnnnnnnnnnnnnnnnnnnnnnnnnnnnnnnnnnnnnnnnnnnnnnnnnnnnnnnnnnnnnnnnnnnnnnnnnnnnnnnnnnnnnnnnnnnnnnnnnnnnnnnnnnnnnnnnnnnnnnnnnnnnnnnnnnnnnnnnnnnnnnnnnnnnnnnnnnnnnnnnnnnnnnnnnnnnnnnnnnnnnnnnnnnnnnnnnnnnnnnnnnnnnnnnnnnnnnnnnnnnnnnnnnnnnnnnnnnnnnnnnnnnnnnnnnnnnnnnnnnnnnnnnnnnnnnnnnnnnnnnnnnnnnnnnnnnnnnnnnnnnnnnnnnnnnnnnnnnnnnnnnnnnnnnnnnnnnnnnnnnnnnnnnnnnnnnnnnnnnnnnnnnnnnnnnnnnnnnnnnnnnnnnnnnnnnnnnnnnnnnnnnnnnnnnnnnnnnnnnnnnnnnnnnnnnnnnnnnnnnnnnnnnnnnnnnnnnnnnnnnnnnnnnnnnnnnnnnnnnnnnnnnnnnnnnnnnnnnnnnnnnnnnnnnnnnnnnnnnnnnnnnnnnnnnnnnnnnnnnnnnnnnnnnnnnnnnnnnnnnnnnnnnnnnnnnnnnnnnnnnnnnnnnnnnnnnnnnnnnnnnnnnnnnnnnnnnnnnnnnnnnnnnnnnnnnnnnnnnnnnnnnnnnnnnnnnnnnnnnnnnnnnnnnnnnnnnnnnnnnnnnnnnnnnnnnnnnnnnnnnnnnnnnnnnnnnnnnnnnnnnnnnnnnnnnnnnnnnnnnnnnnnnnnnnnnnnnnnnnnnnnnnnnnnnnnnnnnnnnnnnnnnnnnnnnnnnnnnnnnnnnnnnnnnnnnnnnnnnnnnnnnnnnnnnnnnnnnnnnnnnnnnnnnnnnnnnnnnnnnnnnnnnnnnnnnnnnnnnnnnnnnnnnnnnnnnnnnnnnnnnnnnnnnnnnnnnnnnnnnnnnnnnnnnnnnnnnnnnnnnnnnnnnnnnnnnnnnnnnnnnnnnnnnnnnnnnnnnnnnnnnnnnnnnnnnnnnnnnnnnnnnnnnnnnnnnnnnnnnnnnnnnnnnnnnnnnnnnnnnnnnnnnnnnnnnnnnnnnnnnnnnnnnnnnnnnnnnnnnnnnnnnnnnnnnnnnnnnnnnnnnnnnnnnnnnnnnnnnnnnnnnnnnnnnnnnnnnnnnnnnnnnnnnnnnnnnnnnnnnnnnnnnnnnnnnnnnnnnnnnnnnnnnnnnnnnnnnnnnnnnnnnnnnnnnnnnnnnnnnnnnnnnnnnnnnnnnnnnnnnnnnnnnnnnnnnnnnnnnnnnnnnnnnnnnnnnnnnnnnnnnnnnnnnnnnnnnnnnnnnnnnnnnnnnnnnnnnnnnnnnnnnnnnnnnnnnnnnnnnnnnnnnnnnnnnnnnnnnnnnnnnnnnnnnnnnnnnnnnnnnnnnnnnnnnnnnnnnnnnnnnnnnnnnnnnnnnnnnnnnnnnnnnnnnnnnnnnnnnnnnnnnnnnnnnnnnnnnnnnnnnnnnnnnnnnnnnnnnnnnnnnnnnnnnnnnnnnnnnnnnnnnnnnnnnnnnnnnnnnnnnnnnnnnnnnnnnnnnnnnnnnnnnnnnnnnnnnnnnnnnnnnnnnnnnnnnnnnnnnnnnnnnnnnnnnnnnnnnnnnnnnnnnnnnnnnnnnnnnnnnnnnnnnnnnnnnnnnnnnnnnnnnnnnnnnnnnnnnnnnnnnnnnnnnnnnnnnnnnnnnnnnnnnnnnnnnnnnnnnnnnnnnnnnnnnnnnnnnnnnnnnnnnnnnnnnnnnnnnnnnnnnnnnnnnnnnnnnnnnnnnnnnnnnnnnnnnnnnnnnnnnnnnnnnnnnnnnnnnnnnnnnnnnnnnnnnnnnnnnnnnnnnnnnnnnnnnnnnnnnnnnnnnnnnnnnnnnnnnnnnnnnnnnnnnnnnnnnnnnnnnnnnnnnnnnnnnnnnnnnnnnnnnnnnnnnnnnnnnnnnnnnnnnnnnnnnnnnnnnnnnnnnnnnnnnnnnnnnnnnnnnnnnnnnnnnnnnnnnnnnnnnnnnnnnnnnnnnnnnnnnnnnnnnnnnnnnnnnnnnnnnnnnnnnnnnnnnnnnnnnnnnnnnnnnnnnnnnnnnnnnnnnnnnnnnnnnnnnnnnnnnnnnnnnnnnnnnnnnnnnnnnnnnnnnnnnnnnnnnnnnnnnnnnnnnnnnnnnnnnnnnnnnnnnnnnnnnnnnnnnnnnnnnnnnnnnnnnnnnnnnnnnnnnnnnnnnnnnnnnnnnnnnnnnnnnnnnnnnnnnnnnnnnnnnnnnnnnnnnnncatatagtagatgcaagaatcgttccgaatctgccacaataactgcggattcctttcccaaagcctttttcgcccacggacaggccgtttgccccttcccactaacatcccgtaaacctccccttaaattcccgcccggccaatgggaactcagcgggaagtattttagatgtgtatgggatggggcaaatggggcttctattgatagtgggtatcaaaatgggaggaagtccacaaattgcgcgaattcatacgaattgcttttccagttacgctaccaactgtggtagataacctaaaataaaggacttacttcccaatcgggcaagtaatccatatgtttggagcccgaaggtcccagaacgattggccgacggggacatcgaccttcctgacgctggcgtcgagcgaggcacgagcatggacgccagcaacatctcctgtagtccatactcgcaagctcgctgcactccaggctcaccaacgttggaaggcaaattcacaaattcacaaccggtaaatatggcttgtgaatttgcaacctgctgatagacgggtaattatgaggctaattcacaaaaaaggggtctcttatacatccgcggaagccgattgtaaacaggatatgatgtatccacgctaccagtctataatacatatagaaatagtatatataatatataatagtattatatattattatatattgatattatatcatctctaccttcccttcatctcttgtttgcggcatgagccactgcaaaccggcattctcccctggtccggctggatataagagataagcgtattttgtgaatttgtcccccaactcactgtgccacaataacacacggattcacaagccatatttaccggttgtgaatttgtgaatctgaccttgccggccttaaggaagtttgaaattagagccctattttggacttgacaaattattccttggtaaatttggtgtataatagctatggggcataatgatgttagcctgtggaacggcctctgtaaaggatcaacaagctatcaaccctccccatgcgacaggagcttcaatgtattataatttgacagacaaaccctggatcagtgtgctacagcttgacgggcattctgccaggctcggcctggctgaggtcctgcgaaaagcacacacactgcgtttggcttacggcaatccgatggaccgcatgtccgttttccgtttcctcctcgccctgggctattggtgttttgccaatacaaaacaagcgccggtatcagataagccactgcctcaggcatggacggactggcttgaacaaaaccaagaatatttcgaattgttcggtgatggccccagattctaccaatccccaggaacatccagaatacgccccagcacggaccttatccacgagcttcccacggcaaacaatttctggcacttccgccatgtgaccgatttcatcgatggcatttgcccagcttgctgcgttaccggtctgctgcgcctgccactctttaccaccgtaggcggcagcggaatcggagccggcatcaacagaactcctcccttctatgccatctggcagggtgatagtctgtcggaatcgatattcctgaattgggaacccacttcccggttgggtgttcctgcctggctgaacccgtttggatcccaaaacgagaaggatgtagccttgctgactggcctcacctggctgccccgcaaggtattcctgcttggcccggtgtcagacggagcaaaatgcagcgcctgcggagaagagcatgagcctctggtctatgcctgcaacaatgaggcggtgaaagtgcctccgaaccttgtctggaacgaccctcacgcgatttaccgggatgacaataatggcctgactgcccaggtggctctgatgtccggggacaaatacactttcgctaacagggattggcataaacccctggtcggcttcttacgggcgaaaggcatgtctcggaccgccacgctgtttttagtgggcttcacaagcgttcaagccaaatgtgtggacgtttgggaaaagaccattgccctatccggaaaaacaagctccgaggaactgctggaccagatatccgaaagagcctactccctgcacaggatgaggaaacaagaccgccggggcgattacaaggaatccgtgggaatcaccgccgtggcggacatcatcccgcacgtagagcatcgggttgacgtccattcgggcgagatggtggaaaacagcggcaatgtctggcaggaagcggatgaagattacggattcttcatgaagcgttttgccgtttctctagtgccggaaattacggttgccgccaagcttgaacgagaacaactggctcggcgcaagccctggcccctaaaaccaaaatcaattaaaaaaccttcatccggaggcgataatgaatgagagcaccgtgaaatttgttcggagcctgggcgaactcaaagagggcgacctgggcttgctcagaaagctcaggggtcgccgtctggatgaatccctgccgggtttcgacctgttttccggcctgtggtggccactccgcagtataagccccaaaacccccaggcggaaggtggtctggctagtcaccaagcttttcgcggaattccgctttgagcaaaagaaaggcgccagcctgccttggctcatgggcagaatatgccgtggacttaaagaagaaaaagagttcccacgtgttttagccaggttcgaccgcttgctcacgctcgagttgaaccaactggaggaaccgctggcgcaagtgctcgcgattttaaaaagacatgacattgccagtctggactgggttgccctcatcgatgacctctccgcttgggaacgggaatcaaacagagcgatatggtcagacacatttatttcagcatttaataatcagcaaggaggaatcaaatgttgattgaaatacacatgatccaaaaccacagcccggccaacctgaaccgggacgacctgggcgcgcccaagacctgttatttcggtggggtgttgcggtcccgcatctccagccagtgcctaaagcggagcatcaggatgagcgatgaattcaaaaacttgctcgggggtatccgtacccgtcggttggccgagttgattacaaaagctacaggacaggactgcaggaatcaggcagaggaagttctgaacaaagccggtttgaaacacgaaaacggacatagtaagatgctggtgttcatgacccggaacaagatcgatgcccttgctcaaattgtcaccagcgaaggcctgagtgttgcagagaaagccaagaaagcggcagatgtaatatcgggggcaatacattcccctgacatcgctctgtgcggaagaatgctcgagcccgataccaaggacaagaacacagacaaggtcaagtgggaaaataccactgttgaagcagccctgcaggtgtcgcacgccatttcaacccacatcgcccgcccagaaatagattactatgtagcagctgatgacgagcctggcgacgacacaggtgctggattcatagacgaggcgatgtttgcttcggcctgtttctacaaatattactcaattgattggaataccttgataatcaacctccagggtaatgaaaagttggcagctcatactgtcggagcctttatccaggccgctgcactcactaatcccagcggaaagcagaacagctttgccgcacataaccttcccgatggaatattggtagaaataaaagagacacctgtcagctatgcaaatgcctttgtgcgaccggtgggaatcgttaaggattctgacttggtagaacaaagcattggccaactggccaactatgtgaaggatataagtgccggtttcttccctggacagatgaaaggcaacgctctgtggttctcgcccaatggacgttatcccctaaagcctcaacagggcacgctggacataaagccagtttgcaacctgctagaacttgttcgcgaagcagttgagatgttgggttttgaatgggatgatgtaaaaaacgagaaagtagagagttgaaatgtcttctccgcctaataccctgttcctgagattggaggctccccttcaggcctggggaagcaatgaggccaaattcgccgtgcgcaggacagccgacgcgcccaccaaatccggagtggcaggcctgctctgcgctgccctgggaatcagccgggccgaagccggacagtattggctgggtgaaattgccaaattgcgcatgggggtgcggatagaccgcccgggcatccgctggtgggattaccatactgtgggagcggagcagaagctgcgcatttctgacctgaaaatgcccaacggcctagttctggttggcactgccctggccaaaaacctgggcgcggacaagatcaaatccaaacccggggctttgctctcccgacgcgagtatttggctgatgccagcttcctggttgcgctccagggtgaaccggatatcgtggcacaactggctgaagcgctgaaaaaaccagtctggacgctttatctggggcgaaaatcctgtcccccctcccgtccggtggatgaacacccgccagggttttatgccagtctgaaagaggctttgcggtcgatcccggcgcaactgagggaaaaaggcgaaccgatacctgacagtgttccctgtgtgctcgactgggttccggcccatgatgacgtgcacgctccgccgaacgccgaagcgcattacgacgtgccggtgtcctttgagcctccccaccacttgccccggctggtgatccgctgtaacctgccattggaccgcaacttcgaggcagagaccgtgctttccggcaaagcctggcaaccgccccgcaaccgggcaaattacgacaatcctgaatacaaaagggtccgcgctgagcgtttggtgatggacaatgccgcctgcatgttctgcaaggcacccgccactactgtgcagcacgtgaattaccgacgcgccggaggcagcgagaagccggaggacttgcgcgccctctgccgcctctgccacgatgcctgcaccatgctggaatatggcagcggcatgaccatggaccgcatagatccctgtgaccccgcctggcgtgagcgcatcttggccaaacgcgaggaaataatcaaattccgctcgctggagcagcgcaggcgcaaactcgatccgaaggaggagaacggatgatgtatctatcccaactgctcatcgacacaggcggcaaccctgaccggccaaggcccgggcgcttgtggctgaacaatatctataatgtccaccggcggctcagcatggctttccccatgcgcaagcgcaaggaaggagacccgaggtttctgcagccctttgaccccgcagattttgaaaagcgccagttcctctttcgggtggacaacaacaccgatggagaaaatcaaagggcgatggttttggtgcagtcgtccctgccgccggattgggactgggctttccagaatgccacgggatttttggcagcccctccccaggttaaggaatacgatccccagttctcagcaggtcagcggctgcgcttccgcatcctcgtgaatgccagtgtcaaacgcaaaatcgacgagttgcgggaaggacccggaggaaaggaaaaaacgggaagggttctgcacaaacgggtcgcccttacctgggacacaaattccaacccaaaggatgcggtggcgcaatggtttgccgccaaggctggcagactgggcttcacgcccggggagaccgaactggtaagcctgggctgggtatacggttccaaaccggagccccggggaaattcgccccggcgtgagaacgaataccgtcccctgagataccgttccgccctgctggaaggttatctgacagtggatgatgcctttctgttccgggaagccttggaaaaaggtatcggcagcgccaaaggaatgggcttcggcctcctttccgtggttccggcaagtgatgcgtaacagagaccttcacctaatgccaaaaatgcgggaccgcttcacctatctctatgtggagcatgccaaaatagacaaagaacaacaggcaatcgcctttcacgatgccatgggctccactcctgttccctgcgctggactggccctgctgatgctggggccaggcgtatccatcacccatgcggccatccttgttttagcagaatgcggctgtttggtggcttgggtgggggaacagggagtccgcttttactcatccgggacagggaccacccgtagttccgccaaccttatgcgtcaggctgccgcctggtcaaatcgagatacgcatctgcggatagttcgcagaatgtatgaattgaggttcaaggaaaaactggacccaaccctctctcttgaacagataaggggaaaagagggagcgagagtacgggatacctatttcagactttcaaaagaattcgatgtgcccatgagtgcgaggaattacgacaggagcaactggaataaaaccgaccccatcaacagagccctgtccgttgccaattcctgtctctatggcatctgccacgccgcgatagtggccgctggctattcacctgccctgggtttcgttcatactggcaaacaactgtcatttgtttatgacattgccgatctttataaaatggaaacctccgtgcccgcggctttcatagccacagccgcaggggtcgataacctggacagaaggacacgcattgcctgccgtgaccagttctatcaatttggtctgctaaagaagatagtggccgacattcacgcccttttcggtattctggaaacttcggacgatgagccagaccttgctgatgtcgatccagccgtgccaggcgggctttggaacccagatgataaagtgagccccggcggcttgtcatggggtctggatgatcctggaggccatgatgatggttctggtgcttgaaaaagttccctctggcctgagaggagaaattacacgctggctcctcgaaatcaaggctggagtatttgtcggtcaggtatcggccatgataagggaaaagctgtgggacaaggccaggtctggttgtgccggtggaacttgtatcatgatttacagcaagcattgcgaacaaggctttggaattgagttttggggtgccgcggaaaggatagtgacagaatgggaaggattgaaattgatgaccaagcatccgtgatccatacttgaagcctgttcaatggcctcaaagcgtctactttcgaagtgtgttccccacctgcgtgggggtgaaccgcggattcgccaagcttgtccctaccgtgatgcgtgttccccacctgcgtgggggtgaaccgaagagcggttttgggcgtataacggcccgcttgtgttccccacctgcgtgggggtgaaccgcctctgggccttagctccgcacaggacaagcagtgttccccacctgcgtgggggtgaaccgctgagaccgctcgctccctgtccgtcattgacgtgttccccacctgcgtgggggtgaaccgtggggtgggggcggttgcccgccccgttccccgtgttccccacctgcgtgggggtgaaccggcaaccaaccgcataggcatagcgaaatcaaggtgttccccacctgcgtgggggtgaaccggacatctggaaagattgggtggcaatggcgatgtgttccccacctgcgtgggggtgaaccggtattcttgcccatcatggaaatgccgtgtccgtgttccccacctgcgtgggggtgaaccggtagctcaactacaagcggcgagccgaacctagtgttccccacctgcgtgggggtgaaccgactgccgctgctccagagtttatgaaacctctgtgttccccacctgcgtgggggtgaaccgatgttcgccggagaggcgctcgactacaccgagtgttccccacctgcgtgggggtgaaccgccctgaagatacaggagcagattgaccaggaagtgttccccacctgcgtgggggtgaaccgaacccaatgaacatggtgtaaaggaaatagaggtgttccccacctgcgtgggggtgaaccgaggtctgagtagtctgcgggccccaggatgaagtgttccccacctgcgtgggggtgaaccgtgatccggacggggctgggcgcggcggatgccgtgttccccacctgcgtgggggtgaaccggtggcttacatcagcctggtgaagaagccggcgtattccccacctgcgtgggggtgaagcggtagaagaacgttccggcaaacagagacgccagtattccccacctgcgtgggggtgaaccgggcgacacaacctctaccatacccgagggtcagtattccccacctgcgtgggggtaattccatttctgccggcgcacagacggcgccgggcagtccctgataatcgcttacttcagcagcagcatcctgatggttttggtttcgctggctgtgctcacccgggcgaaatacacaccgctggccactccccttccggtttcatcacgtccgtcccagcgcagc

SEQ ID NO: 1076 - DNA, 104908 bp, Artificial Sequence
  Synthetic Oligonucleotide
  misc_feature (1)..(96352): n is a, c, g, or t
nnnnnnnnnnnnnnnnnnnnnnnnnnnnnnnnnnnnnnnnnnnnnnnnnnnnnnnnnnnnnnnnnnnnnnnnnnnnnnnnnnnnnnnnnnnnnnnnnnnnnnnnnnnnnnnnnnnnnnnnnnnnnnnnnnnnnnnnnnnnnnnnnnnnnnnnnnnnnnnnnnnnnnnnnnnnnnnnnnnnnnnnnnnnnnnnnnnnnnnnnnnnnnnnnnnnnnnnnnnnnnnnnnnnnnnnnnnnnnnnnnnnnnnnnnnnnnnnnnnnnnnnnnnnnnnnnnnnnnnnnnnnnnnnnnnnnnnnnnnnnnnnnnnnnnnnnnnnnnnnnnnnnnnnnnnnnnnnnnnnnnnnnnnnnnnnnnnnnnnnnnnnnnnnnnnnnnnnnnnnnnnnnnnnnnnnnnnnnnnnnnnnnnnnnnnnnnnnnnnnnnnnnnnnnnnnnnnnnnnnnnnnnnnnnnnnnnnnnnnnnnnnnnnnnnnnnnnnnnnnnnnnnnnnnnnnnnnnnnnnnnnnnnnnnnnnnnnnnnnnnnnnnnnnnnnnnnnnnnnnnnnnnnnnnnnnnnnnnnnnnnnnnnnnnnnnnnnnnnnnnnnnnnnnnnnnnnnnnnnnnnnnnnnnnnnnnnnnnnnnnnnnnnnnnnnnnnnnnnnnnnnnnnnnnnnnnnnnnnnnnnnnnnnnnnnnnnnnnnnnnnnnnnnnnnnnnnnnnnnnnnnnnnnnnnnnnnnnnnnnnnnnnnnnnnnnnnnnnnnnnnnnnnnnnnnnnnnnnnnnnnnnnnnnnnnnnnnnnnnnnnnnnnnnnnnnnnnnnnnnnnnnnnnnnnnnnnnnnnnnnnnnnnnnnnnnnnnnnnnnnnnnnnnnnnnnnnnnnnnnnnnnnnnnnnnnnnnnnnnnnnnnnnnnnnnnnnnnnnnnnnnnnnnnnnnnnnnnnnnnnnnnnnnnnnnnnnnnnnnnnnnnnnnnnnnnnnnnnnnnnnnnnnnnnnnnnnnnnnnnnnnnnnnnnnnnnnnnnnnnnnnnnnnnnnnnnnnnnnnnnnnnnnnnnnnnnnnnnnnnnnnnnnnnnnnnnnnnnnnnnnnnnnnnnnnnnnnnnnnnnnnnnnnnnnnnnnnnnnnnnnnnnnnnnnnnnnnnnnnnnnnnnnnnnnnnnnnnnnnnnnnnnnnnnnnnnnnnnnnnnnnnnnnnnnnnnnnnnnnnnnnnnnnnnnnnnnnnnnnnnnnnnnnnnnnnnnnnnnnnnnnnnnnnnnnnnnnnnnnnnnnnnnnnnnnnnnnnnnnnnnnnnnnnnnnnnnnnnnnnnnnnnnnnnnnnnnnnnnnnnnnnnnnnnnnnnnnnnnnnnnnnnnnnnnnnnnnnnnnnnnnnnnnnnnnnnnnnnnnnnnnnnnnnnnnnnnnnnnnnnnnnnnnnnnnnnnnnnnnnnnnnnnnnnnnnnnnnnnnnnnnnnnnnnnnnnnnnnnnnnnnnnnnnnnnnnnnnnnnnnnnnnnnnnnnnnnnnnnnnnnnnnnnnnnnnnnnnnnnnnnnnnnnnnnnnnnnnnnnnnnnnnnnnnnnnnnnnnnnnnnnnnnnnnnnnnnnnnnnnnnnnnnnnnnnnnnnnnnnnnnnnnnnnnnnnnnnnnnnnnnnnnnnnnnnnnnnnnnnnnnnnnnnnnnnnnnnnnnnnnnnnnnnnnnnnnnnnnnnnnnnnnnnnnnnnnnnnnnnnnnnnnnnnnnnnnnnnnnnnnnnnnnnnnnnnnnnnnnnnnnnnnnnnnnnnnnnnnnnnnnnnnnnnnnnnnnnnnnnnnnnnnnnnnnnnnnnnnnnnnnnnnnnnnnnnnnnnnnnnnnnnnnnnnnnnnnnnnnnnnnnnnnnnnnnnnnnnnnnnnnnnnnnnnnnnnnnnnnnnnnnnnnnnnnnnnnnnnnnnnnnnnnnnnnnnnnnnnnnnnnnnnnnnnnnnnnnnnnnnnnnnnnnnnnnnnnnnnnnnnnnnnnnnnnnnnnnnnnnnnnnnnnnnnnnnnnnnnnnnnnnnnnnnnnnnnnnnnnnnnnnnnnnnnnnnnnnnnnnnnnnnnnnnnnnnnnnnnnnnnnnnnnnnnnnnnnnnnnnnnnnnnnnnnnnnnnnnnnnnnnnnnnnnnnnnnnnnnnnnnnnnnnnnnnnnnnnnnnnnnnnnnnnnnnnnnnnnnnnnnnnnnnnnnnnnnnnnnnnnnnnnnnnnnnnnnnnnnnnnnnnnnnnnnnnnnnnnnnnnnnnnnnnnnnnnnnnnnnnnnnnnnnnnnnnnnnnnnnnnnnnnnnnnnnnnnnnnnnnnnnnnnnnnnnnnnnnnnnnnnnnnnnnnnnnnnnnnnnnnnnnnnnnnnnnnnnnnnnnnnnnnnnnnnnnnnnnnnnnnnnnnnnnnnnnnnnnnnnnnnnnnnnnnnnnnnnnnnnnnnnnnnnnnnnnnnnnnnnnnnnnnnnnnnnnnnnnnnnnnnnnnnnnnnnnnnnnnnnnnnnnnnnnnnnnnnnnnnnnnnnnnnnnnnnnnnnnnnnnnnnnnnnnnnnnnnnnnnnnnnnnnnnnnnnnnnnnnnnnnnnnnnnnnnnnnnnnnnnnnnnnnnnnnnnnnnnnnnnnnnnnnnnnnnnnnnnnnnnnnnnnnnnnnnnnnnnnnnnnnnnnnnnnnnnnnnnnnnnnnnnnnnnnnnnnnnnnnnnnnnnnnnnnnnnnnnnnnnnnnnnnnnnnnnnnnnnnnnnnnnnnnnnnnnnnnnnnnnnnnnnnnnnnnnnnnnnnnnnnnnnnnnnnnnnnnnnnnnnnnnnnnnnnnnnnnnnnnnnnnnnnnnnnnnnnnnnnnnnnnnnnnnnnnnnnnnnnnnnnnnnnnnnnnnnnnnnnnnnnnnnnnnnnnnnnnnnnnnnnnnnnnnnnnnnnnnnnnnnnnnnnnnnnnnnnnnnnnnnnnnnnnnnnnnnnnnnnnnnnnnnnnnnnnnnnnnnnnnnnnnnnnnnnnnnnnnnnnnnnnnnnnnnnnnnnnnnnnnnnnnnnnnnnnnnnnnnnnnnnnnnnnnnnnnnnnnnnnnnnnnnnnnnnnnnnnnnnnnnnnnnnnnnnnnnnnnnnnnnnnnnnnnnnnnnnnnnnnnnnnnnnnnnnnnnnnnnnnnnnnnnnnnnnnnnnnnnnnnnnnnnnnnnnnnnnnnnnnnnnnnnnnnnnnnnnnnnnnnnnnnnnnnnnnnnnnnnnnnnnnnnnnnnnnnnnnnnnnnnnnnnnnnnnnnnnnnnnnnnnnnnnnnnnnnnnnnnnnnnnnnnnnnnnnnnnnnnnnnnnnnnnnnnnnnnnnnnnnnnnnnnnnnnnnnnnnnnnnnnnnnnnnnnnnnnnnnnnnnnnnnnnnnnnnnnnnnnnnnnnnnnnnnnnnnnnnnnnnnnnnnnnnnnnnnnnnnnnnnnnnnnnnnnnnnnnnnnnnnnnnnnnnnnnnnnnnnnnnnnnnnnnnnnnnnnnnnnnnnnnnnnnnnnnnnnnnnnnnnnnnnnnnnnnnnnnnnnnnnnnnnnnnnnnnnnnnnnnnnnnnnnnnnnnnnnnnnnnnnnnnnnnnnnnnnnnnnnnnnnnnnnnnnnnnnnnnnnnnnnnnnnnnnnnnnnnnnnnnnnnnnnnnnnnnnnnnnnnnnnnnnnnnnnnnnnnnnnnnnnnnnnnnnnnnnnnnnnnnnnnnnnnnnnnnnnnnnnnnnnnnnnnnnnnnnnnnnnnnnnnnnnnnnnnnnnnnnnnnnnnnnnnnnnnnnnnnnnnnnnnnnnnnnnnnnnnnnnnnnnnnnnnnnnnnnnnnnnnnnnnnnnnnnnnnnnnnnnnnnnnnnnnnnnnnnnnnnnnnnnnnnnnnnnnnnnnnnnnnnnnnnnnnnnnnnnnnnnnnnnnnnnnnnnnnnnnnnnnnnnnnnnnnnnnnnnnnnnnnnnnnnnnnnnnnnnnnnnnnnnnnnnnnnnnnnnnnnnnnnnnnnnnnnnnnnnnnnnnnnnnnnnnnnnnnnnnnnnnnnnnnnnnnnnnnnnnnnnnnnnnnnnnnnnnnnnnnnnnnnnnnnnnnnnnnnnnnnnnnnnnnnnnnnnnnnnnnnnnnnnnnnnnnnnnnnnnnnnnnnnnnnnnnnnnnnnnnnnnnnnnnnnnnnnnnnnnnnnnnnnnnnnnnnnnnnnnnnnnnnnnnnnnnnnnnnnnnnnnnnnnnnnnnnnnnnnnnnnnnnnnnnnnnnnnnnnnnnnnnnnnnnnnnnnnnnnnnnnnnnnnnnnnnnnnnnnnnnnnnnnnnnnnnnnnnnnnnnnnnnnnnnnnnnnnnnnnnnnnnnnnnnnnnnnnnnnnnnnnnnnnnnnnnnnnnnnnnnnnnnnnnnnnnnnnnnnnnnnnnnnnnnnnnnnnnnnnnnnnnnnnnnnnnnnnnnnnnnnnnnnnnnnnnnnnnnnnnnnnnnnnnnnnnnnnnnnnnnnnnnnnnnnnnnnnnnnnnnnnnnnnnnnnnnnnnnnnnnnnnnnnnnnnnnnnnnnnnnnnnnnnnnnnnnnnnnnnnnnnnnnnnnnnnnnnnnnnnnnnnnnnnnnnnnnnnnnnnnnnnnnnnnnnnnnnnnnnnnnnnnnnnnnnnnnnnnnnnnnnnnnnnnnnnnnnnnnnnnnnnnnnnnnnnnnnnnnnnnnnnnnnnnnnnnnnnnnnnnnnnnnnnnnnnnnnnnnnnnnnnnnnnnnnnnnnnnnnnnnnnnnnnnnnnnnnnnnnnnnnnnnnnnnnnnnnnnnnnnnnnnnnnnnnnnnnnnnnnnnnnnnnnnnnnnnnnnnnnnnnnnnnnnnnnnnnnnnnnnnnnnnnnnnnnnnnnnnnnnnnnnnnnnnnnnnnnnnnnnnnnnnnnnnnnnnnnnnnnnnnnnnnnnnnnnnnnnnnnnnnnnnnnnnnnnnnnnnnnnnnnnnnnnnnnnnnnnnnnnnnnnnnnnnnnnnnnnnnnnnnnnnnnnnnnnnnnnnnnnnnnnnnnnnnnnnnnnnnnnnnnnnnnnnnnnnnnnnnnnnnnnnnnnnnnnnnnnnnnnnnnnnnnnnnnnnnnnnnnnnnnnnnnnnnnnnnnnnnnnnnnnnnnnnnnnnnnnnnnnnnnnnnnnnnnnnnnnnnnnnnnnnnnnnnnnnnnnnnnnnnnnnnnnnnnnnnnnnnnnnnnnnnnnnnnnnnnnnnnnnnnnnnnnnnnnnnnnnnnnnnnnnnnnnnnnnnnnnnnnnnnnnnnnnnnnnnnnnnnnnnnnnnnnnnnnnnnnnnnnnnnnnnnnnnnnnnnnnnnnnnnnnnnnnnnnnnnnnnnnnnnnnnnnnnnnnnnnnnnnnnnnnnnnnnnnnnnnnnnnnnnnnnnnnnnnnnnnnnnnnnnnnnnnnnnnnnnnnnnnnnnnnnnnnnnnnnnnnnnnnnnnnnnnnnnnnnnnnnnnnnnnnnnnnnnnnnnnnnnnnnnnnnnnnnnnnnnnnnnnnnnnnnnnnnnnnnnnnnnnnnnnnnnnnnnnnnnnnnnnnnnnnnnnnnnnnnnnnnnnnnnnnnnnnnnnnnnnnnnnnnnnnnnnnnnnnnnnnnnnnnnnnnnnnnnnnnnnnnnnnnnnnnnnnnnnnnnnnnnnnnnnnnnnnnnnnnnnnnnnnnnnnnnnnnnnnnnnnnnnnnnnnnnnnnnnnnnnnnnnnnnnnnnnnnnnnnnnnnnnnnnnnnnnnnnnnnnnnnnnnnnnnnnnnnnnnnnnnnnnnnnnnnnnnnnnnnnnnnnnnnnnnnnnnnnnnnnnnnnnnnnnnnnnnnnnnnnnnnnnnnnnnnnnnnnnnnnnnnnnnnnnnnnnnnnnnnnnnnnnnnnnnnnnnnnnnnnnnnnnnnnnnnnnnnnnnnnnnnnnnnnnnnnnnnnnnnnnnnnnnnnnnnnnnnnnnnnnnnnnnnnnnnnnnnnnnnnnnnnnnnnnnnnnnnnnnnnnnnnnnnnnnnnnnnnnnnnnnnnnnnnnnnnnnnnnnnnnnnnnnnnnnnnnnnnnnnnnnnnnnnnnnnnnnnnnnnnnnnnnnnnnnnnnnnnnnnnnnnnnnnnnnnnnnnnnnnnnnnnnnnnnnnnnnnnnnnnnnnnnnnnnnnnnnnnnnnnnnnnnnnnnnnnnnnnnnnnnnnnnnnnnnnnnnnnnnnnnnnnnnnnnnnnnnnnnnnnnnnnnnnnnnnnnnnnnnnnnnnnnnnnnnnnnnnnnnnnnnnnnnnnnnnnnnnnnnnnnnnnnnnnnnnnnnnnnnnnnnnnnnnnnnnnnnnnnnnnnnnnnnnnnnnnnnnnnnnnnnnnnnnnnnnnnnnnnnnnnnnnnnnnnnnnnnnnnnnnnnnnnnnnnnnnnnnnnnnnnnnnnnnnnnnnnnnnnnnnnnnnnnnnnnnnnnnnnnnnnnnnnnnnnnnnnnnnnnnnnnnnnnnnnnnnnnnnnnnnnnnnnnnnnnnnnnnnnnnnnnnnnnnnnnnnnnnnnnnnnnnnnnnnnnnnnnnnnnnnnnnnnnnnnnnnnnnnnnnnnnnnnnnnnnnnnnnnnnnnnnnnnnnnnnnnnnnnnnnnnnnnnnnnnnnnnnnnnnnnnnnnnnnnnnnnnnnnnnnnnnnnnnnnnnnnnnnnnnnnnnnnnnnnnnnnnnnnnnnnnnnnnnnnnnnnnnnnnnnnnnnnnnnnnnnnnnnnnnnnnnnnnnnnnnnnnnnnnnnnnnnnnnnnnnnnnnnnnnnnnnnnnnnnnnnnnnnnnnnnnnnnnnnnnnnnnnnnnnnnnnnnnnnnnnnnnnnnnnnnnnnnnnnnnnnnnnnnnnnnnnnnnnnnnnnnnnnnnnnnnnnnnnnnnnnnnnnnnnnnnnnnnnnnnnnnnnnnnnnnnnnnnnnnnnnnnnnnnnnnnnnnnnnnnnnnnnnnnnnnnnnnnnnnnnnnnnnnnnnnnnnnnnnnnnnnnnnnnnnnnnnnnnnnnnnnnnnnnnnnnnnnnnnnnnnnnnnnnnnnnnnnnnnnnnnnnnnnnnnnnnnnnnnnnnnnnnnnnnnnnnnnnnnnnnnnnnnnnnnnnnnnnnnnnnnnnnnnnnnnnnnnnnnnnnnnnnnnnnnnnnnnnnnnnnnnnnnnnnnnnnnnnnnnnnnnnnnnnnnnnnnnnnnnnnnnnnnnnnnnnnnnnnnnnnnnnnnnnnnnnnnnnnnnnnnnnnnnnnnnnnnnnnnnnnnnnnnnnnnnnnnnnnnnnnnnnnnnnnnnnnnnnnnnnnnnnnnnnnnnnnnnnnnnnnnnnnnnnnnnnnnnnnnnnnnnnnnnnnnnnnnnnnnnnnnnnnnnnnnnnnnnnnnnnnnnnnnnnnnnnnnnnnnnnnnnnnnnnnnnnnnnnnnnnnnnnnnnnnnnnnnnnnnnnnnnnnnnnnnnnnnnnnnnnnnnnnnnnnnnnnnnnnnnnnnnnnnnnnnnnnnnnnnnnnnnnnnnnnnnnnnnnnnnnnnnnnnnnnnnnnnnnnnnnnnnnnnnnnnnnnnnnnnnnnnnnnnnnnnnnnnnnnnnnnnnnnnnnnnnnnnnnnnnnnnnnnnnnnnnnnnnnnnnnnnnnnnnnnnnnnnnnnnnnnnnnnnnnnnnnnnnnnnnnnnnnnnnnnnnnnnnnnnnnnnnnnnnnnnnnnnnnnnnnnnnnnnnnnnnnnnnnnnnnnnnnnnnnnnnnnnnnnnnnnnnnnnnnnnnnnnnnnnnnnnnnnnnnnnnnnnnnnnnnnnnnnnnnnnnnnnnnnnnnnnnnnnnnnnnnnnnnnnnnnnnnnnnnnnnnnnnnnnnnnnnnnnnnnnnnnnnnnnnnnnnnnnnnnnnnnnnnnnnnnnnnnnnnnnnnnnnnnnnnnnnnnnnnnnnnnnnnnnnnnnnnnnnnnnnnnnnnnnnnnnnnnnnnnnnnnnnnnnnnnnnnnnnnnnnnnnnnnnnnnnnnnnnnnnnnnnnnnnnnnnnnnnnnnnnnnnnnnnnnnnnnnnnnnnnnnnnnnnnnnnnnnnnnnnnnnnnnnnnnnnnnnnnnnnnnnnnnnnnnnnnnnnnnnnnnnnnnnnnnnnnnnnnnnnnnnnnnnnnnnnnnnnnnnnnnnnnnnnnnnnnnnnnnnnnnnnnnnnnnnnnnnnnnnnnnnnnnnnnnnnnnnnnnnnnnnnnnnnnnnnnnnnnnnnnnnnnnnnnnnnnnnnnnnnnnnnnnnnnnnnnnnnnnnnnnnnnnnnnnnnnnnnnnnnnnnnnnnnnnnnnnnnnnnnnnnnnnnnnnnnnnnnnnnnnnnnnnnnnnnnnnnnnnnnnnnnnnnnnnnnnnnnnnnnnnnnnnnnnnnnnnnnnnnnnnnnnnnnnnnnnnnnnnnnnnnnnnnnnnnnnnnnnnnnnnnnnnnnnnnnnnnnnnnnnnnnnnnnnnnnnnnnnnnnnnnnnnnnnnnnnnnnnnnnnnnnnnnnnnnnnnnnnnnnnnnnnnnnnnnnnnnnnnnnnnnnnnnnnnnnnnnnnnnnnnnnnnnnnnnnnnnnnnnnnnnnnnnnnnnnnnnnnnnnnnnnnnnnnnnnnnnnnnnnnnnnnnnnnnnnnnnnnnnnnnnnnnnnnnnnnnnnnnnnnnnnnnnnnnnnnnnnnnnnnnnnnnnnnnnnnnnnnnnnnnnnnnnnnnnnnnnnnnnnnnnnnnnnnnnnnnnnnnnnnnnnnnnnnnnnnnnnnnnnnnnnnnnnnnnnnnnnnnnnnnnnnnnnnnnnnnnnnnnnnnnnnnnnnnnnnnnnnnnnnnnnnnnnnnnnnnnnnnnnnnnnnnnnnnnnnnnnnnnnnnnnnnnnnnnnnnnnnnnnnnnnnnnnnnnnnnnnnnnnnnnnnnnnnnnnnnnnnnnnnnnnnnnnnnnnnnnnnnnnnnnnnnnnnnnnnnnnnnnnnnnnnnnnnnnnnnnnnnnnnnnnnnnnnnnnnnnnnnnnnnnnnnnnnnnnnnnnnnnnnnnnnnnnnnnnnnnnnnnnnnnnnnnnnnnnnnnnnnnnnnnnnnnnnnnnnnnnnnnnnnnnnnnnnnnnnnnnnnnnnnnnnnnnnnnnnnnnnnnnnnnnnnnnnnnnnnnnnnnnnnnnnnnnnnnnnnnnnnnnnnnnnnnnnnnnnnnnnnnnnnnnnnnnnnnnnnnnnnnnnnnnnnnnnnnnnnnnnnnnnnnnnnnnnnnnnnnnnnnnnnnnnnnnnnnnnnnnnnnnnnnnnnnnnnnnnnnnnnnnnnnnnnnnnnnnnnnnnnnnnnnnnnnnnnnnnnnnnnnnnnnnnnnnnnnnnnnnnnnnnnnnnnnnnnnnnnnnnnnnnnnnnnnnnnnnnnnnnnnnnnnnnnnnnnnnnnnnnnnnnnnnnnnnnnnnnnnnnnnnnnnnnnnnnnnnnnnnnnnnnnnnnnnnnnnnnnnnnnnnnnnnnnnnnnnnnnnnnnnnnnnnnnnnnnnnnnnnnnnnnnnnnnnnnnnnnnnnnnnnnnnnnnnnnnnnnnnnnnnnnnnnnnnnnnnnnnnnnnnnnnnnnnnnnnnnnnnnnnnnnnnnnnnnnnnnnnnnnnnnnnnnnnnnnnnnnnnnnnnnnnnnnnnnnnnnnnnnnnnnnnnnnnnnnnnnnnnnnnnnnnnnnnnnnnnnnnnnnnnnnnnnnnnnnnnnnnnnnnnnnnnnnnnnnnnnnnnnnnnnnnnnnnnnnnnnnnnnnnnnnnnnnnnnnnnnnnnnnnnnnnnnnnnnnnnnnnnnnnnnnnnnnnnnnnnnnnnnnnnnnnnnnnnnnnnnnnnnnnnnnnnnnnnnnnnnnnnnnnnnnnnnnnnnnnnnnnnnnnnnnnnnnnnnnnnnnnnnnnnnnnnnnnnnnnnnnnnnnnnnnnnnnnnnnnnnnnnnnnnnnnnnnnnnnnnnnnnnnnnnnnnnnnnnnnnnnnnnnnnnnnnnnnnnnnnnnnnnnnnnnnnnnnnnnnnnnnnnnnnnnnnnnnnnnnnnnnnnnnnnnnnnnnnnnnnnnnnnnnnnnnnnnnnnnnnnnnnnnnnnnnnnnnnnnnnnnnnnnnnnnnnnnnnnnnnnnnnnnnnnnnnnnnnnnnnnnnnnnnnnnnnnnnnnnnnnnnnnnnnnnnnnnnnnnnnnnnnnnnnnnnnnnnnnnnnnnnnnnnnnnnnnnnnnnnnnnnnnnnnnnnnnnnnnnnnnnnnnnnnnnnnnnnnnnnnnnnnnnnnnnnnnnnnnnnnnnnnnnnnnnnnnnnnnnnnnnnnnnnnnnnnnnnnnnnnnnnnnnnnnnnnnnnnnnnnnnnnnnnnnnnnnnnnnnnnnnnnnnnnnnnnnnnnnnnnnnnnnnnnnnnnnnnnnnnnnnnnnnnnnnnnnnnnnnnnnnnnnnnnnnnnnnnnnnnnnnnnnnnnnnnnnnnnnnnnnnnnnnnnnnnnnnnnnnnnnnnnnnnnnnnnnnnnnnnnnnnnnnnnnnnnnnnnnnnnnnnnnnnnnnnnnnnnnnnnnnnnnnnnnnnnnnnnnnnnnnnnnnnnnnnnnnnnnnnnnnnnnnnnnnnnnnnnnnnnnnnnnnnnnnnnnnnnnnnnnnnnnnnnnnnnnnnnnnnnnnnnnnnnnnnnnnnnnnnnnnnnnnnnnnnnnnnnnnnnnnnnnnnnnnnnnnnnnnnnnnnnnnnnnnnnnnnnnnnnnnnnnnnnnnnnnnnnnnnnnnnnnnnnnnnnnnnnnnnnnnnnnnnnnnnnnnnnnnnnnnnnnnnnnnnnnnnnnnnnnnnnnnnnnnnnnnnnnnnnnnnnnnnnnnnnnnnnnnnnnnnnnnnnnnnnnnnnnnnnnnnnnnnnnnnnnnnnnnnnnnnnnnnnnnnnnnnnnnnnnnnnnnnnnnnnnnnnnnnnnnnnnnnnnnnnnnnnnnnnnnnnnnnnnnnnnnnnnnnnnnnnnnnnnnnnnnnnnnnnnnnnnnnnnnnnnnnnnnnnnnnnnnnnnnnnnnnnnnnnnnnnnnnnnnnnnnnnnnnnnnnnnnnnnnnnnnnnnnnnnnnnnnnnnnnnnnnnnnnnnnnnnnnnnnnnnnnnnnnnnnnnnnnnnnnnnnnnnnnnnnnnnnnnnnnnnnnnnnnnnnnnnnnnnnnnnnnnnnnnnnnnnnnnnnnnnnnnnnnnnnnnnnnnnnnnnnnnnnnnnnnnnnnnnnnnnnnnnnnnnnnnnnnnnnnnnnnnnnnnnnnnnnnnnnnnnnnnnnnnnnnnnnnnnnnnnnnnnnnnnnnnnnnnnnnnnnnnnnnnnnnnnnnnnnnnnnnnnnnnnnnnnnnnnnnnnnnnnnnnnnnnnnnnnnnnnnnnnnnnnnnnnnnnnnnnnnnnnnnnnnnnnnnnnnnnnnnnnnnnnnnnnnnnnnnnnnnnnnnnnnnnnnnnnnnnnnnnnnnnnnnnnnnnnnnnnnnnnnnnnnnnnnnnnnnnnnnnnnnnnnnnnnnnnnnnnnnnnnnnnnnnnnnnnnnnnnnnnnnnnnnnnnnnnnnnnnnnnnnnnnnnnnnnnnnnnnnnnnnnnnnnnnnnnnnnnnnnnnnnnnnnnnnnnnnnnnnnnnnnnnnnnnnnnnnnnnnnnnnnnnnnnnnnnnnnnnnnnnnnnnnnnnnnnnnnnnnnnnnnnnnnnnnnnnnnnnnnnnnnnnnnnnnnnnnnnnnnnnnnnnnnnnnnnnnnnnnnnnnnnnnnnnnnnnnnnnnnnnnnnnnnnnnnnnnnnnnnnnnnnnnnnnnnnnnnnnnnnnnnnnnnnnnnnnnnnnnnnnnnnnnnnnnnnnnnnnnnnnnnnnnnnnnnnnnnnnnnnnnnnnnnnnnnnnnnnnnnnnnnnnnnnnnnnnnnnnnnnnnnnnnnnnnnnnnnnnnnnnnnnnnnnnnnnnnnnnnnnnnnnnnnnnnnnnnnnnnnnnnnnnnnnnnnnnnnnnnnnnnnnnnnnnnnnnnnnnnnnnnnnnnnnnnnnnnnnnnnnnnnnnnnnnnnnnnnnnnnnnnnnnnnnnnnnnnnnnnnnnnnnnnnnnnnnnnnnnnnnnnnnnnnnnnnnnnnnnnnnnnnnnnnnnnnnnnnnnnnnnnnnnnnnnnnnnnnnnnnnnnnnnnnnnnnnnnnnnnnnnnnnnnnnnnnnnnnnnnnnnnnnnnnnnnnnnnnnnnnnnnnnnnnnnnnnnnnnnnnnnnnnnnnnnnnnnnnnnnnnnnnnnnnnnnnnnnnnnnnnnnnnnnnnnnnnnnnnnnnnnnnnnnnnnnnnnnnnnnnnnnnnnnnnnnnnnnnnnnnnnnnnnnnnnnnnnnnnnnnnnnnnnnnnnnnnnnnnnnnnnnnnnnnnnnnnnnnnnnnnnnnnnnnnnnnnnnnnnnnnnnnnnnnnnnnnnnnnnnnnnnnnnnnnnnnnnnnnnnnnnnnnnnnnnnnnnnnnnnnnnnnnnnnnnnnnnnnnnnnnnnnnnnnnnnnnnnnnnnnnnnnnnnnnnnnnnnnnnnnnnnnnnnnnnnnnnnnnnnnnnnnnnnnnnnnnnnnnnnnnnnnnnnnnnnnnnnnnnnnnnnnnnnnnnnnnnnnnnnnnnnnnnnnnnnnnnnnnnnnnnnnnnnnnnnnnnnnnnnnnnnnnnnnnnnnnnnnnnnnnnnnnnnnnnnnnnnnnnnnnnnnnnnnnnnnnnnnnnnnnnnnnnnnnnnnnnnnnnnnnnnnnnnnnnnnnnnnnnnnnnnnnnnnnnnnnnnnnnnnnnnnnnnnnnnnnnnnnnnnnnnnnnnnnnnnnnnnnnnnnnnnnnnnnnnnnnnnnnnnnnnnnnnnnnnnnnnnnnnnnnnnnnnnnnnnnnnnnnnnnnnnnnnnnnnnnnnnnnnnnnnnnnnnnnnnnnnnnnnnnnnnnnnnnnnnnnnnnnnnnnnnnnnnnnnnnnnnnnnnnnnnnnnnnnnnnnnnnnnnnnnnnnnnnnnnnnnnnnnnnnnnnnnnnnnnnnnnnnnnnnnnnnnnnnnnnnnnnnnnnnnnnnnnnnnnnnnnnnnnnnnnnnnnnnnnnnnnnnnnnnnnnnnnnnnnnnnnnnnnnnnnnnnnnnnnnnnnnnnnnnnnnnnnnnnnnnnnnnnnnnnnnnnnnnnnnnnnnnnnnnnnnnnnnnnnnnnnnnnnnnnnnnnnnnnnnnnnnnnnnnnnnnnnnnnnnnnnnnnnnnnnnnnnnnnnnnnnnnnnnnnnnnnnnnnnnnnnnnnnnnnnnnnnnnnnnnnnnnnnnnnnnnnnnnnnnnnnnnnnnnnnnnnnnnnnnnnnnnnnnnnnnnnnnnnnnnnnnnnnnnnnnnnnnnnnnnnnnnnnnnnnnnnnnnnnnnnnnnnnnnnnnnnnnnnnnnnnnnnnnnnnnnnnnnnnnnnnnnnnnnnnnnnnnnnnnnnnnnnnnnnnnnnnnnnnnnnnnnnnnnnnnnnnnnnnnnnnnnnnnnnnnnnnnnnnnnnnnnnnnnnnnnnnnnnnnnnnnnnnnnnnnnnnnnnnnnnnnnnnnnnnnnnnnnnnnnnnnnnnnnnnnnnnnnnnnnnnnnnnnnnnnnnnnnnnnnnnnnnnnnnnnnnnnnnnnnnnnnnnnnnnnnnnnnnnnnnnnnnnnnnnnnnnnnnnnnnnnnnnnnnnnnnnnnnnnnnnnnnnnnnnnnnnnnnnnnnnnnnnnnnnnnnnnnnnnnnnnnnnnnnnnnnnnnnnnnnnnnnnnnnnnnnnnnnnnnnnnnnnnnnnnnnnnnnnnnnnnnnnnnnnnnnnnnnnnnnnnnnnnnnnnnnnnnnnnnnnnnnnnnnnnnnnnnnnnnnnnnnnnnnnnnnnnnnnnnnnnnnnnnnnnnnnnnnnnnnnnnnnnnnnnnnnnnnnnnnnnnnnnnnnnnnnnnnnnnnnnnnnnnnnnnnnnnnnnnnnnnnnnnnnnnnnnnnnnnnnnnnnnnnnnnnnnnnnnnnnnnnnnnnnnnnnnnnnnnnnnnnnnnnnnnnnnnnnnnnnnnnnnnnnnnnnnnnnnnnnnnnnnnnnnnnnnnnnnnnnnnnnnnnnnnnnnnnnnnnnnnnnnnnnnnnnnnnnnnnnnnnnnnnnnnnnnnnnnnnnnnnnnnnnnnnnnnnnnnnnnnnnnnnnnnnnnnnnnnnnnnnnnnnnnnnnnnnnnnnnnnnnnnnnnnnnnnnnnnnnnnnnnnnnnnnnnnnnnnnnnnnnnnnnnnnnnnnnnnnnnnnnnnnnnnnnnnnnnnnnnnnnnnnnnnnnnnnnnnnnnnnnnnnnnnnnnnnnnnnnnnnnnnnnnnnnnnnnnnnnnnnnnnnnnnnnnnnnnnnnnnnnnnnnnnnnnnnnnnnnnnnnnnnnnnnnnnnnnnnnnnnnnnnnnnnnnnnnnnnnnnnnnnnnnnnnnnnnnnnnnnnnnnnnnnnnnnnnnnnnnnnnnnnnnnnnnnnnnnnnnnnnnnnnnnnnnnnnnnnnnnnnnnnnnnnnnnnnnnnnnnnnnnnnnnnnnnnnnnnnnnnnnnnnnnnnnnnnnnnnnnnnnnnnnnnnnnnnnnnnnnnnnnnnnnnnnnnnnnnnnnnnnnnnnnnnnnnnnnnnnnnnnnnnnnnnnnnnnnnnnnnnnnnnnnnnnnnnnnnnnnnnnnnnnnnnnnnnnnnnnnnnnnnnnnnnnnnnnnnnnnnnnnnnnnnnnnnnnnnnnnnnnnnnnnnnnnnnnnnnnnnnnnnnnnnnnnnnnnnnnnnnnnnnnnnnnnnnnnnnnnnnnnnnnnnnnnnnnnnnnnnnnnnnnnnnnnnnnnnnnnnnnnnnnnnnnnnnnnnnnnnnnnnnnnnnnnnnnnnnnnnnnnnnnnnnnnnnnnnnnnnnnnnnnnnnnnnnnnnnnnnnnnnnnnnnnnnnnnnnnnnnnnnnnnnnnnnnnnnnnnnnnnnnnnnnnnnnnnnnnnnnnnnnnnnnnnnnnnnnnnnnnnnnnnnnnnnnnnnnnnnnnnnnnnnnnnnnnnnnnnnnnnnnnnnnnnnnnnnnnnnnnnnnnnnnnnnnnnnnnnnnnnnnnnnnnnnnnnnnnnnnnnnnnnnnnnnnnnnnnnnnnnnnnnnnnnnnnnnnnnnnnnnnnnnnnnnnnnnnnnnnnnnnnnnnnnnnnnnnnnnnnnnnnnnnnnnnnnnnnnnnnnnnnnnnnnnnnnnnnnnnnnnnnnnnnnnnnnnnnnnnnnnnnnnnnnnnnnnnnnnnnnnnnnnnnnnnnnnnnnnnnnnnnnnnnnnnnnnnnnnnnnnnnnnnnnnnnnnnnnnnnnnnnnnnnnnnnnnnnnnnnnnnnnnnnnnnnnnnnnnnnnnnnnnnnnnnnnnnnnnnnnnnnnnnnnnnnnnnnnnnnnnnnnnnnnnnnnnnnnnnnnnnnnnnnnnnnnnnnnnnnnnnnnnnnnnnnnnnnnnnnnnnnnnnnnnnnnnnnnnnnnnnnnnnnnnnnnnnnnnnnnnnnnnnnnnnnnnnnnnnnnnnnnnnnnnnnnnnnnnnnnnnnnnnnnnnnnnnnnnnnnnnnnnnnnnnnnnnnnnnnnnnnnnnnnnnnnnnnnnnnnnnnnnnnnnnnnnnnnnnnnnnnnnnnnnnnnnnnnnnnnnnnnnnnnnnnnnnnnnnnnnnnnnnnnnnnnnnnnnnnnnnnnnnnnnnnnnnnnnnnnnnnnnnnnnnnnnnnnnnnnnnnnnnnnnnnnnnnnnnnnnnnnnnnnnnnnnnnnnnnnnnnnnnnnnnnnnnnnnnnnnnnnnnnnnnnnnnnnnnnnnnnnnnnnnnnnnnnnnnnnnnnnnnnnnnnnnnnnnnnnnnnnnnnnnnnnnnnnnnnnnnnnnnnnnnnnnnnnnnnnnnnnnnnnnnnnnnnnnnnnnnnnnnnnnnnnnnnnnnnnnnnnnnnnnnnnnnnnnnnnnnnnnnnnnnnnnnnnnnnnnnnnnnnnnnnnnnnnnnnnnnnnnnnnnnnnnnnnnnnnnnnnnnnnnnnnnnnnnnnnnnnnnnnnnnnnnnnnnnnnnnnnnnnnnnnnnnnnnnnnnnnnnnnnnnnnnnnnnnnnnnnnnnnnnnnnnnnnnnnnnnnnnnnnnnnnnnnnnnnnnnnnnnnnnnnnnnnnnnnnnnnnnnnnnnnnnnnnnnnnnnnnnnnnnnnnnnnnnnnnnnnnnnnnnnnnnnnnnnnnnnnnnnnnnnnnnnnnnnnnnnnnnnnnnnnnnnnnnnnnnnnnnnnnnnnnnnnnnnnnnnnnnnnnnnnnnnnnnnnnnnnnnnnnnnnnnnnnnnnnnnnnnnnnnnnnnnnnnnnnnnnnnnnnnnnnnnnnnnnnnnnnnnnnnnnnnnnnnnnnnnnnnnnnnnnnnnnnnnnnnnnnnnnnnnnnnnnnnnnnnnnnnnnnnnnnnnnnnnnnnnnnnnnnnnnnnnnnnnnnnnnnnnnnnnnnnnnnnnnnnnnnnnnnnnnnnnnnnnnnnnnnnnnnnnnnnnnnnnnnnnnnnnnnnnnnnnnnnnnnnnnnnnnnnnnnnnnnnnnnnnnnnnnnnnnnnnnnnnnnnnnnnnnnnnnnnnnnnnnnnnnnnnnnnnnnnnnnnnnnnnnnnnnnnnnnnnnnnnnnnnnnnnnnnnnnnnnnnnnnnnnnnnnnnnnnnnnnnnnnnnnnnnnnnnnnnnnnnnnnnnnnnnnnnnnnnnnnnnnnnnnnnnnnnnnnnnnnnnnnnnnnnnnnnnnnnnnnnnnnnnnnnnnnnnnnnnnnnnnnnnnnnnnnnnnnnnnnnnnnnnnnnnnnnnnnnnnnnnnnnnnnnnnnnnnnnnnnnnnnnnnnnnnnnnnnnnnnnnnnnnnnnnnnnnnnnnnnnnnnnnnnnnnnnnnnnnnnnnnnnnnnnnnnnnnnnnnnnnnnnnnnnnnnnnnnnnnnnnnnnnnnnnnnnnnnnnnnnnnnnnnnnnnnnnnnnnnnnnnnnnnnnnnnnnnnnnnnnnnnnnnnnnnnnnnnnnnnnnnnnnnnnnnnnnnnnnnnnnnnnnnnnnnnnnnnnnnnnnnnnnnnnnnnnnnnnnnnnnnnnnnnnnnnnnnnnnnnnnnnnnnnnnnnnnnnnnnnnnnnnnnnnnnnnnnnnnnnnnnnnnnnnnnnnnnnnnnnnnnnnnnnnnnnnnnnnnnnnnnnnnnnnnnnnnnnnnnnnnnnnnnnnnnnnnnnnnnnnnnnnnnnnnnnnnnnnnnnnnnnnnnnnnnnnnnnnnnnnnnnnnnnnnnnnnnnnnnnnnnnnnnnnnnnnnnnnnnnnnnnnnnnnnnnnnnnnnnnnnnnnnnnnnnnnnnnnnnnnnnnnnnnnnnnnnnnnnnnnnnnnnnnnnnnnnnnnnnnnnnnnnnnnnnnnnnnnnnnnnnnnnnnnnnnnnnnnnnnnnnnnnnnnnnnnnnnnnnnnnnnnnnnnnnnnnnnnnnnnnnnnnnnnnnnnnnnnnnnnnnnnnnnnnnnnnnnnnnnnnnnnnnnnnnnnnnnnnnnnnnnnnnnnnnnnnnnnnnnnnnnnnnnnnnnnnnnnnnnnnnnnnnnnnnnnnnnnnnnnnnnnnnnnnnnnnnnnnnnnnnnnnnnnnnnnnnnnnnnnnnnnnnnnnnnnnnnnnnnnnnnnnnnnnnnnnnnnnnnnnnnnnnnnnnnnnnnnnnnnnnnnnnnnnnnnnnnnnnnnnnnnnnnnnnnnnnnnnnnnnnnnnnnnnnnnnnnnnnnnnnnnnnnnnnnnnnnnnnnnnnnnnnnnnnnnnnnnnnnnnnnnnnnnnnnnnnnnnnnnnnnnnnnnnnnnnnnnnnnnnnnnnnnnnnnnnnnnnnnnnnnnnnnnnnnnnnnnnnnnnnnnnnnnnnnnnnnnnnnnnnnnnnnnnnnnnnnnnnnnnnnnnnnnnnnnnnnnnnnnnnnnnnnnnnnnnnnnnnnnnnnnnnnnnnnnnnnnnnnnnnnnnnnnnnnnnnnnnnnnnnnnnnnnnnnnnnnnnnnnnnnnnnnnnnnnnnnnnnnnnnnnnnnnnnnnnnnnnnnnnnnnnnnnnnnnnnnnnnnnnnnnnnnnnnnnnnnnnnnnnnnnnnnnnnnnnnnnnnnnnnnnnnnnnnnnnnnnnnnnnnnnnnnnnnnnnnnnnnnnnnnnnnnnnnnnnnnnnnnnnnnnnnnnnnnnnnnnnnnnnnnnnnnnnnnnnnnnnnnnnnnnnnnnnnnnnnnnnnnnnnnnnnnnnnnnnnnnnnnnnnnnnnnnnnnnnnnnnnnnnnnnnnnnnnnnnnnnnnnnnnnnnnnnnnnnnnnnnnnnnnnnnnnnnnnnnnnnnnnnnnnnnnnnnnnnnnnnnnnnnnnnnnnnnnnnnnnnnnnnnnnnnnnnnnnnnnnnnnnnnnnnnnnnnnnnnnnnnnnnnnnnnnnnnnnnnnnnnnnnnnnnnnnnnnnnnnnnnnnnnnnnnnnnnnnnnnnnnnnnnnnnnnnnnnnnnnnnnnnnnnnnnnnnnnnnnnnnnnnnnnnnnnnnnnnnnnnnnnnnnnnnnnnnnnnnnnnnnnnnnnnnnnnnnnnnnnnnnnnnnnnnnnnnnnnnnnnnnnnnnnnnnnnnnnnnnnnnnnnnnnnnnnnnnnnnnnnnnnnnnnnnnnnnnnnnnnnnnnnnnnnnnnnnnnnnnnnnnnnnnnnnnnnnnnnnnnnnnnnnnnnnnnnnnnnnnnnnnnnnnnnnnnnnnnnnnnnnnnnnnnnnnnnnnnnnnnnnnnnnnnnnnnnnnnnnnnnnnnnnnnnnnnnnnnnnnnnnnnnnnnnnnnnnnnnnnnnnnnnnnnnnnnnnnnnnnnnnnnnnnnnnnnnnnnnnnnnnnnnnnnnnnnnnnnnnnnnnnnnnnnnnnnnnnnnnnnnnnnnnnnnnnnnnnnnnnnnnnnnnnnnnnnnnnnnnnnnnnnnnnnnnnnnnnnnnnnnnnnnnnnnnnnnnnnnnnnnnnnnnnnnnnnnnnnnnnnnnnnnnnnnnnnnnnnnnnnnnnnnnnnnnnnnnnnnnnnnnnnnnnnnnnnnnnnnnnnnnnnnnnnnnnnnnnnnnnnnnnnnnnnnnnnnnnnnnnnnnnnnnnnnnnnnnnnnnnnnnnnnnnnnnnnnnnnnnnnnnnnnnnnnnnnnnnnnnnnnnnnnnnnnnnnnnnnnnnnnnnnnnnnnnnnnnnnnnnnnnnnnnnnnnnnnnnnnnnnnnnnnnnnnnnnnnnnnnnnnnnnnnnnnnnnnnnnnnnnnnnnnnnnnnnnnnnnnnnnnnnnnnnnnnnnnnnnnnnnnnnnnnnnnnnnnnnnnnnnnnnnnnnnnnnnnnnnnnnnnnnnnnnnnnnnnnnnnnnnnnnnnnnnnnnnnnnnnnnnnnnnnnnnnnnnnnnnnnnnnnnnnnnnnnnnnnnnnnnnnnnnnnnnnnnnnnnnnnnnnnnnnnnnnnnnnnnnnnnnnnnnnnnnnnnnnnnnnnnnnnnnnnnnnnnnnnnnnnnnnnnnnnnnnnnnnnnnnnnnnnnnnnnnnnnnnnnnnnnnnnnnnnnnnnnnnnnnnnnnnnnnnnnnnnnnnnnnnnnnnnnnnnnnnnnnnnnnnnnnnnnnnnnnnnnnnnnnnnnnnnnnnnnnnnnnnnnnnnnnnnnnnnnnnnnnnnnnnnnnnnnnnnnnnnnnnnnnnnnnnnnnnnnnnnnnnnnnnnnnnnnnnnnnnnnnnnnnnnnnnnnnnnnnnnnnnnnnnnnnnnnnnnnnnnnnnnnnnnnnnnnnnnnnnnnnnnnnnnnnnnnnnnnnnnnnnnnnnnnnnnnnnnnnnnnnnnnnnnnnnnnnnnnnnnnnnnnnnnnnnnnnnnnnnnnnnnnnnnnnnnnnnnnnnnnnnnnnnnnnnnnnnnnnnnnnnnnnnnnnnnnnnnnnnnnnnnnnnnnnnnnnnnnnnnnnnnnnnnnnnnnnnnnnnnnnnnnnnnnnnnnnnnnnnnnnnnnnnnnnnnnnnnnnnnnnnnnnnnnnnnnnnnnnnnnnnnnnnnnnnnnnnnnnnnnnnnnnnnnnnnnnnnnnnnnnnnnnnnnnnnnnnnnnnnnnnnnnnnnnnnnnnnnnnnnnnnnnnnnnnnnnnnnnnnnnnnnnnnnnnnnnnnnnnnnnnnnnnnnnnnnnnnnnnnnnnnnnnnnnnnnnnnnnnnnnnnnnnnnnnnnnnnnnnnnnnnnnnnnnnnnnnnnnnnnnnnnnnnnnnnnnnnnnnnnnnnnnnnnnnnnnnnnnnnnnnnnnnnnnnnnnnnnnnnnnnnnnnnnnnnnnnnnnnnnnnnnnnnnnnnnnnnnnnnnnnnnnnnnnnnnnnnnnnnnnnnnnnnnnnnnnnnnnnnnnnnnnnnnnnnnnnnnnnnnnnnnnnnnnnnnnnnnnnnnnnnnnnnnnnnnnnnnnnnnnnnnnnnnnnnnnnnnnnnnnnnnnnnnnnnnnnnnnnnnnnnnnnnnnnnnnnnnnnnnnnnnnnnnnnnnnnnnnnnnnnnnnnnnnnnnnnnnnnnnnnnnnnnnnnnnnnnnnnnnnnnnnnnnnnnnnnnnnnnnnnnnnnnnnnnnnnnnnnnnnnnnnnnnnnnnnnnnnnnnnnnnnnnnnnnnnnnnnnnnnnnnnnnnnnnnnnnnnnnnnnnnnnnnnnnnnnnnnnnnnnnnnnnnnnnnnnnnnnnnnnnnnnnnnnnnnnnnnnnnnnnnnnnnnnnnnnnnnnnnnnnnnnnnnnnnnnnnnnnnnnnnnnnnnnnnnnnnnnnnnnnnnnnnnnnnnnnnnnnnnnnnnnnnnnnnnnnnnnnnnnnnnnnnnnnnnnnnnnnnnnnnnnnnnnnnnnnnnnnnnnnnnnnnnnnnnnnnnnnnnnnnnnnnnnnnnnnnnnnnnnnnnnnnnnnnnnnnnnnnnnnnnnnnnnnnnnnnnnnnnnnnnnnnnnnnnnnnnnnnnnnnnnnnnnnnnnnnnnnnnnnnnnnnnnnnnnnnnnnnnnnnnnnnnnnnnnnnnnnnnnnnnnnnnnnnnnnnnnnnnnnnnnnnnnnnnnnnnnnnnnnnnnnnnnnnnnnnnnnnnnnnnnnnnnnnnnnnnnnnnnnnnnnnnnnnnnnnnnnnnnnnnnnnnnnnnnnnnnnnnnnnnnnnnnnnnnnnnnnnnnnnnnnnnnnnnnnnnnnnnnnnnnnnnnnnnnnnnnnnnnnnnnnnnnnnnnnnnnnnnnnnnnnnnnnnnnnnnnnnnnnnnnnnnnnnnnnnnnnnnnnnnnnnnnnnnnnnnnnnnnnnnnnnnnnnnnnnnnnnnnnnnnnnnnnnnnnnnnnnnnnnnnnnnnnnnnnnnnnnnnnnnnnnnnnnnnnnnnnnnnnnnnnnnnnnnnnnnnnnnnnnnnnnnnnnnnnnnnnnnnnnnnnnnnnnnnnnnnnnnnnnnnnnnnnnnnnnnnnnnnnnnnnnnnnnnnnnnnnnnnnnnnnnnnnnnnnnnnnnnnnnnnnnnnnnnnnnnnnnnnnnnnnnnnnnnnnnnnnnnnnnnnnnnnnnnnnnnnnnnnnnnnnnnnnnnnnnnnnnnnnnnnnnnnnnnnnnnnnnnnnnnnnnnnnnnnnnnnnnnnnnnnnnnnnnnnnnnnnnnnnnnnnnnnnnnnnnnnnnnnnnnnnnnnnnnnnnnnnnnnnnnnnnnnnnnnnnnnnnnnnnnnnnnnnnnnnnnnnnnnnnnnnnnnnnnnnnnnnnnnnnnnnnnnnnnnnnnnnnnnnnnnnnnnnnnnnnnnnnnnnnnnnnnnnnnnnnnnnnnnnnnnnnnnnnnnnnnnnnnnnnnnnnnnnnnnnnnnnnnnnnnnnnnnnnnnnnnnnnnnnnnnnnnnnnnnnnnnnnnnnnnnnnnnnnnnnnnnnnnnnnnnnnnnnnnnnnnnnnnnnnnnnnnnnnnnnnnnnnnnnnnnnnnnnnnnnnnnnnnnnnnnnnnnnnnnnnnnnnnnnnnnnnnnnnnnnnnnnnnnnnnnnnnnnnnnnnnnnnnnnnnnnnnnnnnnnnnnnnnnnnnnnnnnnnnnnnnnnnnnnnnnnnnnnnnnnnnnnnnnnnnnnnnnnnnnnnnnnnnnnnnnnnnnnnnnnnnnnnnnnnnnnnnnnnnnnnnnnnnnnnnnnnnnnnnnnnnnnnnnnnnnnnnnnnnnnnnnnnnnnnnnnnnnnnnnnnnnnnnnnnnnnnnnnnnnnnnnnnnnnnnnnnnnnnnnnnnnnnnnnnnnnnnnnnnnnnnnnnnnnnnnnnnnnnnnnnnnnnnnnnnnnnnnnnnnnnnnnnnnnnnnnnnnnnnnnnnnnnnnnnnnnnnnnnnnnnnnnnnnnnnnnnnnnnnnnnnnnnnnnnnnnnnnnnnnnnnnnnnnnnnnnnnnnnnnnnnnnnnnnnnnnnnnnnnnnnnnnnnnnnnnnnnnnnnnnnnnnnnnnnnnnnnnnnnnnnnnnnnnnnnnnnnnnnnnnnnnnnnnnnnnnnnnnnnnnnnnnnnnnnnnnnnnnnnnnnnnnnnnnnnnnnnnnnnnnnnnnnnnnnnnnnnnnnnnnnnnnnnnnnnnnnnnnnnnnnnnnnnnnnnnnnnnnnnnnnnnnnnnnnnnnnnnnnnnnnnnnnnnnnnnnnnnnnnnnnnnnnnnnnnnnnnnnnnnnnnnnnnnnnnnnnnnnnnnnnnnnnnnnnnnnnnnnnnnnnnnnnnnnnnnnnnnnnnnnnnnnnnnnnnnnnnnnnnnnnnnnnnnnnnnnnnnnnnnnnnnnnnnnnnnnnnnnnnnnnnnnnnnnnnnnnnnnnnnnnnnnnnnnnnnnnnnnnnnnnnnnnnnnnnnnnnnnnnnnnnnnnnnnnnnnnnnnnnnnnnnnnnnnnnnnnnnnnnnnnnnnnnnnnnnnnnnnnnnnnnnnnnnnnnnnnnnnnnnnnnnnnnnnnnnnnnnnnnnnnnnnnnnnnnnnnnnnnnnnnnnnnnnnnnnnnnnnnnnnnnnnnnnnnnnnnnnnnnnnnnnnnnnnnnnnnnnnnnnnnnnnnnnnnnnnnnnnnnnnnnnnnnnnnnnnnnnnnnnnnnnnnnnnnnnnnnnnnnnnnnnnnnnnnnnnnnnnnnnnnnnnnnnnnnnnnnnnnnnnnnnnnnnnnnnnnnnnnnnnnnnnnnnnnnnnnnnnnnnnnnnnnnnnnnnnnnnnnnnnnnnnnnnnnnnnnnnnnnnnnnnnnnnnnnnnnnnnnnnnnnnnnnnnnnnnnnnnnnnnnnnnnnnnnnnnnnnnnnnnnnnnnnnnnnnnnnnnnnnnnnnnnnnnnnnnnnnnnnnnnnnnnnnnnnnnnnnnnnnnnnnnnnnnnnnnnnnnnnnnnnnnnnnnnnnnnnnnnnnnnnnnnnnnnnnnnnnnnnnnnnnnnnnnnnnnnnnnnnnnnnnnnnnnnnnnnnnnnnnnnnnnnnnnnnnnnnnnnnnnnnnnnnnnnnnnnnnnnnnnnnnnnnnnnnnnnnnnnnnnnnnnnnnnnnnnnnnnnnnnnnnnnnnnnnnnnnnnnnnnnnnnnnnnnnnnnnnnnnnnnnnnnnnnnnnnnnnnnnnnnnnnnnnnnnnnnnnnnnnnnnnnnnnnnnnnnnnnnnnnnnnnnnnnnnnnnnnnnnnnnnnnnnnnnnnnnnnnnnnnnnnnnnnnnnnnnnnnnnnnnnnnnnnnnnnnnnnnnnnnnnnnnnnnnnnnnnnnnnnnnnnnnnnnnnnnnnnnnnnnnnnnnnnnnnnnnnnnnnnnnnnnnnnnnnnnnnnnnnnnnnnnnnnnnnnnnnnnnnnnnnnnnnnnnnnnnnnnnnnnnnnnnnnnnnnnnnnnnnnnnnnnnnnnnnnnnnnnnnnnnnnnnnnnnnnnnnnnnnnnnnnnnnnnnnnnnnnnnnnnnnnnnnnnnnnnnnnnnnnnnnnnnnnnnnnnnnnnnnnnnnnnnnnnnnnnnnnnnnnnnnnnnnnnnnnnnnnnnnnnnnnnnnnnnnnnnnnnnnnnnnnnnnnnnnnnnnnnnnnnnnnnnnnnnnnnnnnnnnnnnnnnnnnnnnnnnnnnnnnnnnnnnnnnnnnnnnnnnnnnnnnnnnnnnnnnnnnnnnnnnnnnnnnnnnnnnnnnnnnnnnnnnnnnnnnnnnnnnnnnnnnnnnnnnnnnnnnnnnnnnnnnnnnnnnnnnnnnnnnnnnnnnnnnnnnnnnnnnnnnnnnnnnnnnnnnnnnnnnnnnnnnnnnnnnnnnnnnnnnnnnnnnnnnnnnnnnnnnnnnnnnnnnnnnnnnnnnnnnnnnnnnnnnnnnnnnnnnnnnnnnnnnnnnnnnnnnnnnnnnnnnnnnnnnnnnnnnnnnnnnnnnnnnnnnnnnnnnnnnnnnnnnnnnnnnnnnnnnnnnnnnnnnnnnnnnnnnnnnnnnnnnnnnnnnnnnnnnnnnnnnnnnnnnnnnnnnnnnnnnnnnnnnnnnnnnnnnnnnnnnnnnnnnnnnnnnnnnnnnnnnnnnnnnnnnnnnnnnnnnnnnnnnnnnnnnnnnnnnnnnnnnnnnnnnnnnnnnnnnnnnnnnnnnnnnnnnnnnnnnnnnnnnnnnnnnnnnnnnnnnnnnnnnnnnnnnnnnnnnnnnnnnnnnnnnnnnnnnnnnnnnnnnnnnnnnnnnnnnnnnnnnnnnnnnnnnnnnnnnnnnnnnnnnnnnnnnnnnnnnnnnnnnnnnnnnnnnnnnnnnnnnnnnnnnnnnnnnnnnnnnnnnnnnnnnnnnnnnnnnnnnnnnnnnnnnnnnnnnnnnnnnnnnnnnnnnnnnnnnnnnnnnnnnnnnnnnnnnnnnnnnnnnnnnnnnnnnnnnnnnnnnnnnnnnnnnnnnnnnnnnnnnnnnnnnnnnnnnnnnnnnnnnnnnnnnnnnnnnnnnnnnnnnnnnnnnnnnnnnnnnnnnnnnnnnnnnnnnnnnnnnnnnnnnnnnnnnnnnnnnnnnnnnnnnnnnnnnnnnnnnnnnnnnnnnnnnnnnnnnnnnnnnnnnnnnnnnnnnnnnnnnnnnnnnnnnnnnnnnnnnnnnnnnnnnnnnnnnnnnnnnnnnnnnnnnnnnnnnnnnnnnnnnnnnnnnnnnnnnnnnnnnnnnnnnnnnnnnnnnnnnnnnnnnnnnnnnnnnnnnnnnnnnnnnnnnnnnnnnnnnnnnnnnnnnnnnnnnnnnnnnnnnnnnnnnnnnnnnnnnnnnnnnnnnnnnnnnnnnnnnnnnnnnnnnnnnnnnnnnnnnnnnnnnnnnnnnnnnnnnnnnnnnnnnnnnnnnnnnnnnnnnnnnnnnnnnnnnnnnnnnnnnnnnnnnnnnnnnnnnnnnnnnnnnnnnnnnnnnnnnnnnnnnnnnnnnnnnnnnnnnnnnnnnnnnnnnnnnnnnnnnnnnnnnnnnnnnnnnnnnnnnnnnnnnnnnnnnnnnnnnnnnnnnnnnnnnnnnnnnnnnnnnnnnnnnnnnnnnnnnnnnnnnnnnnnnnnnnnnnnnnnnnnnnnnnnnnnnnnnnnnnnnnnnnnnnnnnnnnnnnnnnnnnnnnnnnnnnnnnnnnnnnnnnnnnnnnnnnnnnnnnnnnnnnnnnnnnnnnnnnnnnnnnnnnnnnnnnnnnnnnnnnnnnnnnnnnnnnnnnnnnnnnnnnnnnnnnnnnnnnnnnnnnnnnnnnnnnnnnnnnnnnnnnnnnnnnnnnnnnnnnnnnnnnnnnnnnnnnnnnnnnnnnnnnnnnnnnnnnnnnnnnnnnnnnnnnnnnnnnnnnnnnnnnnnnnnnnnnnnnnnnnnnnnnnnnnnnnnnnnnnnnnnnnnnnnnnnnnnnnnnnnnnnnnnnnnnnnnnnnnnnnnnnnnnnnnnnnnnnnnnnnnnnnnnnnnnnnnnnnnnnnnnnnnnnnnnnnnnnnnnnnnnnnnnnnnnnnnnnnnnnnnnnnnnnnnnnnnnnnnnnnnnnnnnnnnnnnnnnnnnnnnnnnnnnnnnnnnnnnnnnnnnnnnnnnnnnnnnnnnnnnnnnnnnnnnnnnnnnnnnnnnnnnnnnnnnnnnnnnnnnnnnnnnnnnnnnnnnnnnnnnnnnnnnnnnnnnnnnnnnnnnnnnnnnnnnnnnnnnnnnnnnnnnnnnnnnnnnnnnnnnnnnnnnnnnnnnnnnnnnnnnnnnnnnnnnnnnnnnnnnnnnnnnnnnnnnnnnnnnnnnnnnnnnnnnnnnnnnnnnnnnnnnnnnnnnnnnnnnnnnnnnnnnnnnnnnnnnnnnnnnnnnnnnnnnnnnnnnnnnnnnnnnnnnnnnnnnnnnnnnnnnnnnnnnnnnnnnnnnnnnnnnnnnnnnnnnnnnnnnnnnnnnnnnnnnnnnnnnnnnnnnnnnnnnnnnnnnnnnnnnnnnnnnnnnnnnnnnnnnnnnnnnnnnnnnnnnnnnnnnnnnnnnnnnnnnnnnnnnnnnnnnnnnnnnnnnnnnnnnnnnnnnnnnnnnnnnnnnnnnnnnnnnnnnnnnnnnnnnnnnnnnnnnnnnnnnnnnnnnnnnnnnnnnnnnnnnnnnnnnnnnnnnnnnnnnnnnnnnnnnnnnnnnnnnnnnnnnnnnnnnnnnnnnnnnnnnnnnnnnnnnnnnnnnnnnnnnnnnnnnnnnnnnnnnnnnnnnnnnnnnnnnnnnnnnnnnnnnnnnnnnnnnnnnnnnnnnnnnnnnnnnnnnnnnnnnnnnnnnnnnnnnnnnnnnnnnnnnnnnnnnnnnnnnnnnnnnnnnnnnnnnnnnnnnnnnnnnnnnnnnnnnnnnnnnnnnnnnnnnnnnnnnnnnnnnnnnnnnnnnnnnnnnnnnnnnnnnnnnnnnnnnnnnnnnnnnnnnnnnnnnnnnnnnnnnnnnnnnnnnnnnnnnnnnnnnnnnnnnnnnnnnnnnnnnnnnnnnnnnnnnnnnnnnnnnnnnnnnnnnnnnnnnnnnnnnnnnnnnnnnnnnnnnnnnnnnnnnnnnnnnnnnnnnnnnnnnnnnnnnnnnnnnnnnnnnnnnnnnnnnnnnnnnnnnnnnnnnnnnnnnnnnnnnnnnnnnnnnnnnnnnnnnnnnnnnnnnnnnnnnnnnnnnnnnnnnnnnnnnnnnnnnnnnnnnnnnnnnnnnnnnnnnnnnnnnnnnnnnnnnnnnnnnnnnnnnnnnnnnnnnnnnnnnnnnnnnnnnnnnnnnnnnnnnnnnnnnnnnnnnnnnnnnnnnnnnnnnnnnnnnnnnnnnnnnnnnnnnnnnnnnnnnnnnnnnnnnnnnnnnnnnnnnnnnnnnnnnnnnnnnnnnnnnnnnnnnnnnnnnnnnnnnnnnnnnnnnnnnnnnnnnnnnnnnnnnnnnnnnnnnnnnnnnnnnnnnnnnnnnnnnnnnnnnnnnnnnnnnnnnnnnnnnnnnnnnnnnnnnnnnnnnnnnnnnnnnnnnnnnnnnnnnnnnnnnnnnnnnnnnnnnnnnnnnnnnnnnnnnnnnnnnnnnnnnnnnnnnnnnnnnnnnnnnnnnnnnnnnnnnnnnnnnnnnnnnnnnnnnnnnnnnnnnnnnnnnnnnnnnnnnnnnnnnnnnnnnnnnnnnnnnnnnnnnnnnnnnnnnnnnnnnnnnnnnnnnnnnnnnnnnnnnnnnnnnnnnnnnnnnnnnnnnnnnnnnnnnnnnnnnnnnnnnnnnnnnnnnnnnnnnnnnnnnnnnnnnnnnnnnnnnnnnnnnnnnnnnnnnnnnnnnnnnnnnnnnnnnnnnnnnnnnnnnnnnnnnnnnnnnnnnnnnnnnnnnnnnnnnnnnnnnnnnnnnnnnnnnnnnnnnnnnnnnnnnnnnnnnnnnnnnnnnnnnnnnnnnnnnnnnnnnnnnnnnnnnnnnnnnnnnnnnnnnnnnnnnnnnnnnnnnnnnnnnnnnnnnnnnnnnnnnnnnnnnnnnnnnnnnnnnnnnnnnnnnnnnnnnnnnnnnnnnnnnnnnnnnnnnnnnnnnnnnnnnnnnnnnnnnnnnnnnnnnnnnnnnnnnnnnnnnnnnnnnnnnnnnnnnnnnnnnnnnnnnnnnnnnnnnnnnnnnnnnnnnnnnnnnnnnnnnnnnnnnnnnnnnnnnnnnnnnnnnnnnnnnnnnnnnnnnnnnnnnnnnnnnnnnnnnnnnnnnnnnnnnnnnnnnnnnnnnnnnnnnnnnnnnnnnnnnnnnnnnnnnnnnnnnnnnnnnnnnnnnnnnnnnnnnnnnnnnnnnnnnnnnnnnnnnnnnnnnnnnnnnnnnnnnnnnnnnnnnnnnnnnnnnnnnnnnnnnnnnnnnnnnnnnnnnnnnnnnnnnnnnnnnnnnnnnnnnnnnnnnnnnnnnnnnnnnnnnnnnnnnnnnnnnnnnnnnnnnnnnnnnnnnnnnnnnnnnnnnnnnnnnnnnnnnnnnnnnnnnnnnnnnnnnnnnnnnnnnnnnnnnnnnnnnnnnnnnnnnnnnnnnnnnnnnnnnnnnnnnnnnnnnnnnnnnnnnnnnnnnnnnnnnnnnnnnnnnnnnnnnnnnnnnnnnnnnnnnnnnnnnnnnnnnnnnnnnnnnnnnnnnnnnnnnnnnnnnnnnnnnnnnnnnnnnnnnnnnnnnnnnnnnnnnnnnnnnnnnnnnnnnnnnnnnnnnnnnnnnnnnnnnnnnnnnnnnnnnnnnnnnnnnnnnnnnnnnnnnnnnnnnnnnnnnnnnnnnnnnnnnnnnnnnnnnnnnnnnnnnnnnnnnnnnnnnnnnnnnnnnnnnnnnnnnnnnnnnnnnnnnnnnnnnnnnnnnnnnnnnnnnnnnnnnnnnnnnnnnnnnnnnnnnnnnnnnnnnnnnnnnnnnnnnnnnnnnnnnnnnnnnnnnnnnnnnnnnnnnnnnnnnnnnnnnnnnnnnnnnnnnnnnnnnnnnnnnnnnnnnnnnnnnnnnnnnnnnnnnnnnnnnnnnnnnnnnnnnnnnnnnnnnnnnnnnnnnnnnnnnnnnnnnnnnnnnnnnnnnnnnnnnnnnnnnnnnnnnnnnnnnnnnnnnnnnnnnnnnnnnnnnnnnnnnnnnnnnnnnnnnnnnnnnnnnnnnnnnnnnnnnnnnnnnnnnnnnnnnnnnnnnnnnnnnnnnnnnnnnnnnnnnnnnnnnnnnnnnnnnnnnnnnnnnnnnnnnnnnnnnnnnnnnnnnnnnnnnnnnnnnnnnnnnnnnnnnnnnnnnnnnnnnnnnnnnnnnnnnnnnnnnnnnnnnnnnnnnnnnnnnnnnnnnnnnnnnnnnnnnnnnnnnnnnnnnnnnnnnnnnnnnnnnnnnnnnnnnnnnnnnnnnnnnnnnnnnnnnnnnnnnnnnnnnnnnnnnnnnnnnnnnnnnnnnnnnnnnnnnnnnnnnnnnnnnnnnnnnnnnnnnnnnnnnnnnnnnnnnnnnnnnnnnnnnnnnnnnnnnnnnnnnnnnnnnnnnnnnnnnnnnnnnnnnnnnnnnnnnnnnnnnnnnnnnnnnnnnnnnnnnnnnnnnnnnnnnnnnnnnnnnnnnnnnnnnnnnnnnnnnnnnnnnnnnnnnnnnnnnnnnnnnnnnnnnnnnnnnnnnnnnnnnnnnnnnnnnnnnnnnnnnnnnnnnnnnnnnnnnnnnnnnnnnnnnnnnnnnnnnnnnnnnnnnnnnnnnnnnnnnnnnnnnnnnnnnnnnnnnnnnnnnnnnnnnnnnnnnnnnnnnnnnnnnnnnnnnnnnnnnnnnnnnnnnnnnnnnnnnnnnnnnnnnnnnnnnnnnnnnnnnnnnnnnnnnnnnnnnnnnnnnnnnnnnnnnnnnnnnnnnnnnnnnnnnnnnnnnnnnnnnnnnnnnnnnnnnnnnnnnnnnnnnnnnnnnnnnnnnnnnnnnnnnnnnnnnnnnnnnnnnnnnnnnnnnnnnnnnnnnnnnnnnnnnnnnnnnnnnnnnnnnnnnnnnnnnnnnnnnnnnnnnnnnnnnnnnnnnnnnnnnnnnnnnnnnnnnnnnnnnnnnnnnnnnnnnnnnnnnnnnnnnnnnnnnnnnnnnnnnnnnnnnnnnnnnnnnnnnnnnnnnnnnnnnnnnnnnnnnnnnnnnnnnnnnnnnnnnnnnnnnnnnnnnnnnnnnnnnnnnnnnnnnnnnnnnnnnnnnnnnnnnnnnnnnnnnnnnnnnnnnnnnnnnnnnnnnnnnnnnnnnnnnnnnnnnnnnnnnnnnnnnnnnnnnnnnnnnnnnnnnnnnnnnnnnnnnnnnnnnnnnnnnnnnnnnnnnnnnnnnnnnnnnnnnnnnnnnnnnnnnnnnnnnnnnnnnnnnnnnnnnnnnnnnnnnnnnnnnnnnnnnnnnnnnnnnnnnnnnnnnnnnnnnnnnnnnnnnnnnnnnnnnnnnnnnnnnnnnnnnnnnnnnnnnnnnnnnnnnnnnnnnnnnnnnnnnnnnnnnnnnnnnnnnnnnnnnnnnnnnnnnnnnnnnnnnnnnnnnnnnnnnnnnnnnnnnnnnnnnnnnnnnnnnnnnnnnnnnnnnnnnnnnnnnnnnnnnnnnnnnnnnnnnnnnnnnnnnnnnnnnnnnnnnnnnnnnnnnnnnnnnnnnnnnnnnnnnnnnnnnnnnnnnnnnnnnnnnnnnnnnnnnnnnnnnnnnnnnnnnnnnnnnnnnnnnnnnnnnnnnnnnnnnnnnnnnnnnnnnnnnnnnnnnnnnnnnnnnnnnnnnnnnnnnnnnnnnnnnnnnnnnnnnnnnnnnnnnnnnnnnnnnnnnnnnnnnnnnnnnnnnnnnnnnnnnnnnnnnnnnnnnnnnnnnnnnnnnnnnnnnnnnnnnnnnnnnnnnnnnnnnnnnnnnnnnnnnnnnnnnnnnnnnnnnnnnnnnnnnnnnnnnnnnnnnnnnnnnnnnnnnnnnnnnnnnnnnnnnnnnnnnnnnnnnnnnnnnnnnnnnnnnnnnnnnnnnnnnnnnnnnnnnnnnnnnnnnnnnnnnnnnnnnnnnnnnnnnnnnnnnnnnnnnnnnnnnnnnnnnnnnnnnnnnnnnnnnnnnnnnnnnnnnnnnnnnnnnnnnnnnnnnnnnnnnnnnnnnnnnnnnnnnnnnnnnnnnnnnnnnnnnnnnnnnnnnnnnnnnnnnnnnnnnnnnnnnnnnnnnnnnnnnnnnnnnnnnnnnnnnnnnnnnnnnnnnnnnnnnnnnnnnnnnnnnnnnnnnnnnnnnnnnnnnnnnnnnnnnnnnnnnnnnnnnnnnnnnnnnnnnnnnnnnnnnnnnnnnnnnnnnnnnnnnnnnnnnnnnnnnnnnnnnnnnnnnnnnnnnnnnnnnnnnnnnnnnnnnnnnnnnnnnnnnnnnnnnnnnnnnnnnnnnnnnnnnnnnnnnnnnnnnnnnnnnnnnnnnnnnnnnnnnnnnnnnnnnnnnnnnnnnnnnnnnnnnnnnnnnnnnnnnnnnnnnnnnnnnnnnnnnnnnnnnnnnnnnnnnnnnnnnnnnnnnnnnnnnnnnnnnnnnnnnnnnnnnnnnnnnnnnnnnnnnnnnnnnnnnnnnnnnnnnnnnnnnnnnnnnnnnnnnnnnnnnnnnnnnnnnnnnnnnnnnnnnnnnnnnnnnnnnnnnnnnnnnnnnnnnnnnnnnnnnnnnnnnnnnnnnnnnnnnnnnnnnnnnnnnnnnnnnnnnnnnnnnnnnnnnnnnnnnnnnnnnnnnnnnnnnnnnnnnnnnnnnnnnnnnnnnnnnnnnnnnnnnnnnnnnnnnnnnnnnnnnnnnnnnnnnnnnnnnnnnnnnnnnnnnnnnnnnnnnnnnnnnnnnnnnnnnnnnnnnnnnnnnnnnnnnnnnnnnnnnnnnnnnnnnnnnnnnnnnnnnnnnnnnnnnnnnnnnnnnnnnnnnnnnnnnnnnnnnnnnnnnnnnnnnnnnnnnnnnnnnnnnnnnnnnnnnnnnnnnnnnnnnnnnnnnnnnnnnnnnnnnnnnnnnnnnnnnnnnnnnnnnnnnnnnnnnnnnnnnnnnnnnnnnnnnnnnnnnnnnnnnnnnnnnnnnnnnnnnnnnnnnnnnnnnnnnnnnnnnnnnnnnnnnnnnnnnnnnnnnnnnnnnnnnnnnnnnnnnnnnnnnnnnnnnnnnnnnnnnnnnnnnnnnnnnnnnnnnnnnnnnnnnnnnnnnnnnnnnnnnnnnnnnnnnnnnnnnnnnnnnnnnnnnnnnnnnnnnnnnnnnnnnnnnnnnnnnnnnnnnnnnnnnnnnnnnnnnnnnnnnnnnnnnnnnnnnnnnnnnnnnnnnnnnnnnnnnnnnnnnnnnnnnnnnnnnnnnnnnnnnnnnnnnnnnnnnnnnnnnnnnnnnnnnnnnnnnnnnnnnnnnnnnnnnnnnnnnnnnnnnnnnnnnnnnnnnnnnnnnnnnnnnnnnnnnnnnnnnnnnnnnnnnnnnnnnnnnnnnnnnnnnnnnnnnnnnnnnnnnnnnnnnnnnnnnnnnnnnnnnnnnnnnnnnnnnnnnnnnnnnnnnnnnnnnnnnnnnnnnnnnnnnnnnnnnnnnnnnnnnnnnnnnnnnnnnnnnnnnnnnnnnnnnnnnnnnnnnnnnnnnnnnnnnnnnnnnnnnnnnnnnnnnnnnnnnnnnnnnnnnnnnnnnnnnnnnnnnnnnnnnnnnnnnnnnnnnnnnnnnnnnnnnnnnnnnnnnnnnnnnnnnnnnnnnnnnnnnnnnnnnnnnnnnnnnnnnnnnnnnnnnnnnnnnnnnnnnnnnnnnnnnnnnnnnnnnnnnnnnnnnnnnnnnnnnnnnnnnnnnnnnnnnnnnnnnnnnnnnnnnnnnnnnnnnnnnnnnnnnnnnnnnnnnnnnnnnnnnnnnnnnnnnnnnnnnnnnnnnnnnnnnnnnnnnnnnnnnnnnnnnnnnnnnnnnnnnnnnnnnnnnnnnnnnnnnnnnnnnnnnnnnnnnnnnnnnnnnnnnnnnnnnnnnnnnnnnnnnnnnnnnnnnnnnnnnnnnnnnnnnnnnnnnnnnnnnnnnnnnnnnnnnnnnnnnnnnnnnnnnnnnnnnnnnnnnnnnnnnnnnnnnnnnnnnnnnnnnnnnnnnnnnnnnnnnnnnnnnnnnnnnnnnnnnnnnnnnnnnnnnnnnnnnnnnnnnnnnnnnnnnnnnnnnnnnnnnnnnnnnnnnnnnnnnnnnnnnnnnnnnnnnnnnnnnnnnnnnnnnnnnnnnnnnnnnnnnnnnnnnnnnnnnnnnnnnnnnnnnnnnnnnnnnnnnnnnnnnnnnnnnnnnnnnnnnnnnnnnnnnnnnnnnnnnnnnnnnnnnnnnnnnnnnnnnnnnnnnnnnnnnnnnnnnnnnnnnnnnnnnnnnnnnnnnnnnnnnnnnnnnnnnnnnnnnnnnnnnnnnnnnnnnnnnnnnnnnnnnnnnnnnnnnnnnnnnnnnnnnnnnnnnnnnnnnnnnnnnnnnnnnnnnnnnnnnnnnnnnnnnnnnnnnnnnnnnnnnnnnnnnnnnnnnnnnnnnnnnnnnnnnnnnnnnnnnnnnnnnnnnnnnnnnnnnnnnnnnnnnnnnnnnnnnnnnnnnnnnnnnnnnnnnnnnnnnnnnnnnnnnnnnnnnnnnnnnnnnnnnnnnnnnnnnnnnnnnnnnnnnnnnnnnnnnnnnnnnnnnnnnnnnnnnnnnnnnnnnnnnnnnnnnnnnnnnnnnnnnnnnnnnnnnnnnnnnnnnnnnnnnnnnnnnnnnnnnnnnnnnnnnnnnnnnnnnnnnnnnnnnnnnnnnnnnnnnnnnnnnnnnnnnnnnnnnnnnnnnnnnnnnnnnnnnnnnnnnnnnnnnnnnnnnnnnnnnnnnnnnnnnnnnnnnnnnnnnnnnnnnnnnnnnnnnnnnnnnnnnnnnnnnnnnnnnnnnnnnnnnnnnnnnnnnnnnnnnnnnnnnnnnnnnnnnnnnnnnnnnnnnnnnnnnnnnnnnnnnnnnnnnnnnnnnnnnnnnnnnnnnnnnnnnnnnnnnnnnnnnnnnnnnnnnnnnnnnnnnnnnnnnnnnnnnnnnnnnnnnnnnnnnnnnnnnnnnnnnnnnnnnnnnnnnnnnnnnnnnnnnnnnnnnnnnnnnnnnnnnnnnnnnnnnnnnnnnnnnnnnnnnnnnnnnnnnnnnnnnnnnnnnnnnnnnnnnnnnnnnnnnnnnnnnnnnnnnnnnnnnnnnnnnnnnnnnnnnnnnnnnnnnnnnnnnnnnnnnnnnnnnnnnnnnnnnnnnnnnnnnnnnnnnnnnnnnnnnnnnnnnnnnnnnnnnnnnnnnnnnnnnnnnnnnnnnnnnnnnnnnnnnnnnnnnnnnnnnnnnnnnnnnnnnnnnnnnnnnnnnnnnnnnnnnnnnnnnnnnnnnnnnnnnnnnnnnnnnnnnnnnnnnnnnnnnnnnnnnnnnnnnnnnnnnnnnnnnnnnnnnnnnnnnnnnnnnnnnnnnnnnnnnnnnnnnnnnnnnnnnnnnnnnnnnnnnnnnnnnnnnnnnnnnnnnnnnnnnnnnnnnnnnnnnnnnnnnnnnnnnnnnnnnnnnnnnnnnnnnnnnnnnnnnnnnnnnnnnnnnnnnnnnnnnnnnnnnnnnnnnnnnnnnnnnnnnnnnnnnnnnnnnnnnnnnnnnnnnnnnnnnnnnnnnnnnnnnnnnnnnnnnnnnnnnnnnnnnnnnnnnnnnnnnnnnnnnnnnnnnnnnnnnnnnnnnnnnnnnnnnnnnnnnnnnnnnnnnnnnnnnnnnnnnnnnnnnnnnnnnnnnnnnnnnnnnnnnnnnnnnnnnnnnnnnnnnnnnnnnnnnnnnnnnnnnnnnnnnnnnnnnnnnnnnnnnnnnnnnnnnnnnnnnnnnnnnnnnnnnnnnnnnnnnnnnnnnnnnnnnnnnnnnnnnnnnnnnnnnnnnnnnnnnnnnnnnnnnnnnnnnnnnnnnnnnnnnnnnnnnnnnnnnnnnnnnnnnnnnnnnnnnnnnnnnnnnnnnnnnnnnnnnnnnnnnnnnnnnnnnnnnnnnnnnnnnnnnnnnnnnnnnnnnnnnnnnnnnnnnnnnnnnnnnnnnnnnnnnnnnnnnnnnnnnnnnnnnnnnnnnnnnnnnnnnnnnnnnnnnnnnnnnnnnnnnnnnnnnnnnnnnnnnnnnnnnnnnnnnnnnnnnnnnnnnnnnnnnnnnnnnnnnnnnnnnnnnnnnnnnnnnnnnnnnnnnnnnnnnnnnnnnnnnnnnnnnnnnnnnnnnnnnnnnnnnnnnnnnnnnnnnnnnnnnnnnnnnnnnnnnnnnnnnnnnnnnnnnnnnnnnnnnnnnnnnnnnnnnnnnnnnnnnnnnnnnnnnnnnnnnnnnnnnnnnnnnnnnnnnnnnnnnnnnnnnnnnnnnnnnnnnnnnnnnnnnnnnnnnnnnnnnnnnnnnnnnnnnnnnnnnnnnnnnnnnnnnnnnnnnnnnnnnnnnnnnnnnnnnnnnnnnnnnnnnnnnnnnnnnnnnnnnnnnnnnnnnnnnnnnnnnnnnnnnnnnnnnnnnnnnnnnnnnnnnnnnnnnnnnnnnnnnnnnnnnnnnnnnnnnnnnnnnnnnnnnnnnnnnnnnnnnnnnnnnnnnnnnnnnnnnnnnnnnnnnnnnnnnnnnnnnnnnnnnnnnnnnnnnnnnnnnnnnnnnnnnnnnnnnnnnnnnnnnnnnnnnnnnnnnnnnnnnnnnnnnnnnnnnnnnnnnnnnnnnnnnnnnnnnnnnnnnnnnnnnnnnnnnnnnnnnnnnnnnnnnnnnnnnnnnnnnnnnnnnnnnnnnnnnnnnnnnnnnnnnnnnnnnnnnnnnnnnnnnnnnnnnnnnnnnnnnnnnnnnnnnnnnnnnnnnnnnnnnnnnnnnnnnnnnnnnnnnnnnnnnnnnnnnnnnnnnnnnnnnnnnnnnnnnnnnnnnnnnnnnnnnnnnnnnnnnnnnnnnnnnnnnnnnnnnnnnnnnnnnnnnnnnnnnnnnnnnnnnnnnnnnnnnnnnnnnnnnnnnnnnnnnnnnnnnnnnnnnnnnnnnnnnnnnnnnnnnnnnnnnnnnnnnnnnnnnnnnnnnnnnnnnnnnnnnnnnnnnnnnnnnnnnnnnnnnnnnnnnnnnnnnnnnnnnnnnnnnnnnnnnnnnnnnnnnnnnnnnnnnnnnnnnnnnnnnnnnnnnnnnnnnnnnnnnnnnnnnnnnnnnnnnnnnnnnnnnnnnnnnnnnnnnnnnnnnnnnnnnnnnnnnnnnnnnnnnnnnnnnnnnnnnnnnnnnnnnnnnnnnnnnnnnnnnnnnnnnnnnnnnnnnnnnnnnnnnnnnnnnnnnnnnnnnnnnnnnnnnnnnnnnnnnnnnnnnnnnnnnnnnnnnnnnnnnnnnnnnnnnnnnnnnnnnnnnnnnnnnnnnnnnnnnnnnnnnnnnnnnnnnnnnnnnnnnnnnnnnnnnnnnnnnnnnnnnnnnnnnnnnnnnnnnnnnnnnnnnnnnnnnnnnnnnnnnnnnnnnnnnnnnnnnnnnnnnnnnnnnnnnnnnnnnnnnnnnnnnnnnnnnnnnnnnnnnnnnnnnnnnnnnnnnnnnnnnnnnnnnnnnnnnnnnnnnnnnnnnnnnnnnnnnnnnnnnnnnnnnnnnnnnnnnnnnnnnnnnnnnnnnnnnnnnnnnnnnnnnnnnnnnnnnnnnnnnnnnnnnnnnnnnnnnnnnnnnnnnnnnnnnnnnnnnnnnnnnnnnnnnnnnnnnnnnnnnnnnnnnnnnnnnnnnnnnnnnnnnnnnnnnnnnnnnnnnnnnnnnnnnnnnnnnnnnnnnnnnnnnnnnnnnnnnnnnnnnnnnnnnnnnnnnnnnnnnnnnnnnnnnnnnnnnnnnnnnnnnnnnnnnnnnnnnnnnnnnnnnnnnnnnnnnnnnnnnnnnnnnnnnnnnnnnnnnnnnnnnnnnnnnnnnnnnnnnnnnnnnnnnnnnnnnnnnnnnnnnnnnnnnnnnnnnnnnnnnnnnnnnnnnnnnnnnnnnnnnnnnnnnnnnnnnnnnnnnnnnnnnnnnnnnnnnnnnnnnnnnnnnnnnnnnnnnnnnnnnnnnnnnnnnnnnnnnnnnnnnnnnnnnnnnnnnnnnnnnnnnnnnnnnnnnnnnnnnnnnnnnnnnnnnnnnnnnnnnnnnnnnnnnnnnnnnnnnnnnnnnnnnnnnnnnnnnnnnnnnnnnnnnnnnnnnnnnnnnnnnnnnnnnnnnnnnnnnnnnnnnnnnnnnnnnnnnnnnnnnnnnnnnnnnnnnnnnnnnnnnnnnnnnnnnnnnnnnnnnnnnnnnnnnnnnnnnnnnnnnnnnnnnnnnnnnnnnnnnnnnnnnnnnnnnnnnnnnnnnnnnnnnnnnnnnnnnnnnnnnnnnnnnnnnnnnnnnnnnnnnnnnnnnnnnnnnnnnnnnnnnnnnnnnnnnnnnnnnnnnnnnnnnnnnnnnnnnnnnnnnnnnnnnnnnnnnnnnnnnnnnnnnnnnnnnnnnnnnnnnnnnnnnnnnnnnnnnnnnnnnnnnnnnnnnnnnnnnnnnnnnnnnnnnnnnnnnnnnnnnnnnnnnnnnnnnnnnnnnnnnnnnnnnnnnnnnnnnnnnnnnnnnnnnnnnnnnnnnnnnnnnnnnnnnnnnnnnnnnnnnnnnnnnnnnnnnnnnnnnnnnnnnnnnnnnnnnnnnnnnnnnnnnnnnnnnnnnnnnnnnnnnnnnnnnnnnnnnnnnnnnnnnnnnnnnnnnnnnnnnnnnnnnnnnnnnnnnnnnnnnnnnnnnnnnnnnnnnnnnnnnnnnnnnnnnnnnnnnnnnnnnnnnnnnnnnnnnnnnnnnnnnnnnnnnnnnnnnnnnnnnnnnnnnnnnnnnnnnnnnnnnnnnnnnnnnnnnnnnnnnnnnnnnnnnnnnnnnnnnnnnnnnnnnnnnnnnnnnnnnnnnnnnnnnnnnnnnnnnnnnnnnnnnnnnnnnnnnnnnnnnnnnnnnnnnnnnnnnnnnnnnnnnnnnnnnnnnnnnnnnnnnnnnnnnnnnnnnnnnnnnnnnnnnnnnnnnnnnnnnnnnnnnnnnnnnnnnnnnnnnnnnnnnnnnnnnnnnnnnnnnnnnnnnnnnnnnnnnnnnnnnnnnnnnnnnnnnnnnnnnnnnnnnnnnnnnnnnnnnnnnnnnnnnnnnnnnnnnnnnnnnnnnnnnnnnnnnnnnnnnnnnnnnnnnnnnnnnnnnnnnnnnnnnnnnnnnnnnnnnnnnnnnnnnnnnnnnnnnnnnnnnnnnnnnnnnnnnnnnnnnnnnnnnnnnnnnnnnnnnnnnnnnnnnnnnnnnnnnnnnnnnnnnnnnnnnnnnnnnnnnnnnnnnnnnnnnnnnnnnnnnnnnnnnnnnnnnnnnnnnnnnnnnnnnnnnnnnnnnnnnnnnnnnnnnnnnnnnnnnnnnnnnnnnnnnnnnnnnnnnnnnnnnnnnnnnnnnnnnnnnnnnnnnnnnnnnnnnnnnnnnnnnnnnnnnnnnnnnnnnnnnnnnnnnnnnnnnnnnnnnnnnnnnnnnnnnnnnnnnnnnnnnnnnnnnnnnnnnnnnnnnnnnnnnnnnnnnnnnnnnnnnnnnnnnnnnnnnnnnnnnnnnnnnnnnnnnnnnnnnnnnnnnnnnnnnnnnnnnnnnnnnnnnnnnnnnnnnnnnnnnnnnnnnnnnnnnnnnnnnnnnnnnnnnnnnnnnnnnnnnnnnnnnnnnnnnnnnnnnnnnnnnnnnnnnnnnnnnnnnnnnnnnnnnnnnnnnnnnnnnnnnnnnnnnnnnnnnnnnnnnnnnnnnnnnnnnnnnnnnnnnnnnnnnnnnnnnnnnnnnnnnnnnnnnnnnnnnnnnnnnnnnnnnnnnnnnnnnnnnnnnnnnnnnnnnnnnnnnnnnnnnnnnnnnnnnnnnnnnnnnnnnnnnnnnnnnnnnnnnnnnnnnnnnnnnnnnnnnnnnnnnnnnnnnnnnnnnnnnnnnnnnnnnnnnnnnnnnnnnnnnnnnnnnnnnnnnnnnnnnnnnnnnnnnnnnnnnnnnnnnnnnnnnnnnnnnnnnnnnnnnnnnnnnnnnnnnnnnnnnnnnnnnnnnnnnnnnnnnnnnnnnnnnnnnnnnnnnnnnnnnnnnnnnnnnnnnnnnnnnnnnnnnnnnnnnnnnnnnnnnnnnnnnnnnnnnnnnnnnnnnnnnnnnnnnnnnnnnnnnnnnnnnnnnnnnnnnnnnnnnnnnnnnnnnnnnnnnnnnnnnnnnnnnnnnnnnnnnnnnnnnnnnnnnnnnnnnnnnnnnnnnnnnnnnnnnnnnnnnnnnnnnnnnnnnnnnnnnnnnnnnnnnnnnnnnnnnnnnnnnnnnnnnnnnnnnnnnnnnnnnnnnnnnnnnnnnnnnnnnnnnnnnnnnnnnnnnnnnnnnnnnnnnnnnnnnnnnnnnnnnnnnnnnnnnnnnnnnnnnnnnnnnnnnnnnnnnnnnnnnnnnnnnnnnnnnnnnnnnnnnnnnnnnnnnnnnnnnnnnnnnnnnnnnnnnnnnnnnnnnnnnnnnnnnnnnnnnnnnnnnnnnnnnnnnnnnnnnnnnnnnnnnnnnnnnnnnnnnnnnnnnnnnnnnnnnnnnnnnnnnnnnnnnnnnnnnnnnnnnnnnnnnnnnnnnnnnnnnnnnnnnnnnnnnnnnnnnnnnnnnnnnnnnnnnnnnnnnnnnnnnnnnnnnnnnnnnnnnnnnnnnnnnnnnnnnnnnnnnnnnnnnnnnnnnnnnnnnnnnnnnnnnnnnnnnnnnnnnnnnnnnnnnnnnnnnnnnnnnnnnnnnnnnnnnnnnnnnnnnnnnnnnnnnnnnnnnnnnnnnnnnnnnnnnnnnnnnnnnnnnnnnnnnnnnnnnnnnnnnnnnnnnnnnnnnnnnnnnnnnnnnnnnnnnnnnnnnnnnnnnnnnnnnnnnnnnnnnnnnnnnnnnnnnnnnnnnnnnnnnnnnnnnnnnnnnnnnnnnnnnnnnnnnnnnnnnnnnnnnnnnnnnnnnnnnnnnnnnnnnnnnnnnnnnnnnnnnnnnnnnnnnnnnnnnnnnnnnnnnnnnnnnnnnnnnnnnnnnnnnnnnnnnnnnnnnnnnnnnnnnnnnnnnnnnnnnnnnnnnnnnnnnnnnnnnnnnnnnnnnnnnnnnnnnnnnnnnnnnnnnnnnnnnnnnnnnnnnnnnnnnnnnnnnnnnnnnnnnnnnnnnnnnnnnnnnnnnnnnnnnnnnnnnnnnnnnnnnnnnnnnnnnnnnnnnnnnnnnnnnnnnnnnnnnnnnnnnnnnnnnnnnnnnnnnnnnnnnnnnnnnnnnnnnnnnnnnnnnnnnnnnnnnnnnnnnnnnnnnnnnnnnnnnnnnnnnnnnnnnnnnnnnnnnnnnnnnnnnnnnnnnnnnnnnnnnnnnnnnnnnnnnnnnnnnnnnnnnnnnnnnnnnnnnnnnnnnnnnnnnnnnnnnnnnnnnnnnnnnnnnnnnnnnnnnnnnnnnnnnnnnnnnnnnnnnnnnnnnnnnnnnnnnnnnnnnnnnnnnnnnnnnnnnnnnnnnnnnnnnnnnnnnnnnnnnnnnnnnnnnnnnnnnnnnnnnnnnnnnnnnnnnnnnnnnnnnnnnnnnnnnnnnnnnnnnnnnnnnnnnnnnnnnnnnnnnnnnnnnnnnnnnnnnnnnnnnnnnnnnnnnnnnnnnnnnnnnnnnnnnnnnnnnnnnnnnnnnnnnnnnnnnnnnnnnnnnnnnnnnnnnnnnnnnnnnnnnnnnnnnnnnnnnnnnnnnnnnnnnnnnnnnnnnnnnnnnnnnnnnnnnnnnnnnnnnnnnnnnnnnnnnnnnnnnnnnnnnnnnnnnnnnnnnnnnnnnnnnnnnnnnnnnnnnnnnnnnnnnnnnnnnnnnnnnnnnnnnnnnnnnnnnnnnnnnnnnnnnnnnnnnnnnnnnnnnnnnnnnnnnnnnnnnnnnnnnnnnnnnnnnnnnnnnnnnnnnnnnnnnnnnnnnnnnnnnnnnnnnnnnnnnnnnnnnnnnnnnnnnnnnnnnnnnnnnnnnnnnnnnnnnnnnnnnnnnnnnnnnnnnnnnnnnnnnnnnnnnnnnnnnnnnnnnnnnnnnnnnnnnnnnnnnnnnnnnnnnnnnnnnnnnnnnnnnnnnnnnnnnnnnnnnnnnnnnnnnnnnnnnnnnnnnnnnnnnnnnnnnnnnnnnnnnnnnnnnnnnnnnnnnnnnnnnnnnnnnnnnnnnnnnnnnnnnnnnnnnnnnnnnnnnnnnnnnnnnnnnnnnnnnnnnnnnnnnnnnnnnnnnnnnnnnnnnnnnnnnnnnnnnnnnnnnnnnnnnnnnnnnnnnnnnnnnnnnnnnnnnnnnnnnnnnnnnnnnnnnnnnnnnnnnnnnnnnnnnnnnnnnnnnnnnnnnnnnnnnnnnnnnnnnnnnnnnnnnnnnnnnnnnnnnnnnnnnnnnnnnnnnnnnnnnnnnnnnnnnnnnnnnnnnnnnnnnnnnnnnnnnnnnnnnnnnnnnnnnnnnnnnnnnnnnnnnnnnnnnnnnnnnnnnnnnnnnnnnnnnnnnnnnnnnnnnnnnnnnnnnnnnnnnnnnnnnnnnnnnnnnnnnnnnnnnnnnnnnnnnnnnnnnnnnnnnnnnnnnnnnnnnnnnnnnnnnnnnnnnnnnnnnnnnnnnnnnnnnnnnnnnnnnnnnnnnnnnnnnnnnnnnnnnnnnnnnnnnnnnnnnnnnnnnnnnnnnnnnnnnnnnnnnnnnnnnnnnnnnnnnnnnnnnnnnnnnnnnnnnnnnnnnnnnnnnnnnnnnnnnnnnnnnnnnnnnnnnnnnnnnnnnnnnnnnnnnnnnnnnnnnnnnnnnnnnnnnnnnnnnnnnnnnnnnnnnnnnnnnnnnnnnnnnnnnnnnnnnnnnnnnnnnnnnnnnnnnnnnnnnnnnnnnnnnnnnnnnnnnnnnnnnnnnnnnnnnnnnnnnnnnnnnnnnnnnnnnnnnnnnnnnnnnnnnnnnnnnnnnnnnnnnnnnnnnnnnnnnnnnnnnnnnnnnnnnnnnnnnnnnnnnnnnnnnnnnnnnnnnnnnnnnnnnnnnnnnnnnnnnnnnnnnnnnnnnnnnnnnnnnnnnnnnnnnnnnnnnnnnnnnnnnnnnnnnnnnnnnnnnnnnnnnnnnnnnnnnnnnnnnnnnnnnnnnnnnnnnnnnnnnnnnnnnnnnnnnnnnnnnnnnnnnnnnnnnnnnnnnnnnnnnnnnnnnnnnnnnnnnnnnnnnnnnnnnnnnnnnnnnnnnnnnnnnnnnnnnnnnnnnnnnnnnnnnnnnnnnnnnnnnnnnnnnnnnnnnnnnnnnnnnnnnnnnnnnnnnnnnnnnnnnnnnnnnnnnnnnnnnnnnnnnnnnnnnnnnnnnnnnnnnnnnnnnnnnnnnnnnnnnnnnnnnnnnnnnnnnnnnnnnnnnnnnnnnnnnnnnnnnnnnnnnnnnnnnnnnnnnnnnnnnnnnnnnnnnnnnnnnnnnnnnnnnnnnnnnnnnnnnnnnnnnnnnnnnnnnnnnnnnnnnnnnnnnnnnnnnnnnnnnnnnnnnnnnnnnnnnnnnnnnnnnnnnnnnnnnnnnnnnnnnnnnnnnnnnnnnnnnnnnnnnnnnnnnnnnnnnnnnnnnnnnnnnnnnnnnnnnnnnnnnnnnnnnnnnnnnnnnnnnnnnnnnnnnnnnnnnnnnnnnnnnnnnnnnnnnnnnnnnnnnnnnnnnnnnnnnnnnnnnnnnnnnnnnnnnnnnnnnnnnnnnnnnnnnnnnnnnnnnnnnnnnnnnnnnnnnnnnnnnnnnnnnnnnnnnnnnnnnnnnnnnnnnnnnnnnnnnnnnnnnnnnnnnnnnnnnnnnnnnnnnnnnnnnnnnnnnnnnnnnnnnnnnnnnnnnnnnnnnnnnnnnnnnnnnnnnnnnnnnnnnnnnnnnnnnnnnnnnnnnnnnnnnnnnnnnnnnnnnnnnnnnnnnnnnnnnnnnnnnnnnnnnnnnnnnnnnnnnnnnnnnnnnnnnnnnnnnnnnnnnnnnnnnnnnnnnnnnnnnnnnnnnnnnnnnnnnnnnnnnnnnnnnnnnnnnnnnnnnnnnnnnnnnnnnnnnnnnnnnnnnnnnnnnnnnnnnnnnnnnnnnnnnnnnnnnnnnnnnnnnnnnnnnnnnnnnnnnnnnnnnnnnnnnnnnnnnnnnnnnnnnnnnnnnnnnnnnnnnnnnnnnnnnnnnnnnnnnnnnnnnnnnnnnnnnnnnnnnnnnnnnnnnnnnnnnnnnnnnnnnnnnnnnnnnnnnnnnnnnnnnnnnnnnnnnnnnnnnnnnnnnnnnnnnnnnnnnnnnnnnnnnnnnnnnnnnnnnnnnnnnnnnnnnnnnnnnnnnnnnnnnnnnnnnnnnnnnnnnnnnnnnnnnnnnnnnnnnnnnnnnnnnnnnnnnnnnnnnnnnnnnnnnnnnnnnnnnnnnnnnnnnnnnnnnnnnnnnnnnnnnnnnnnnnnnnnnnnnnnnnnnnnnnnnnnnnnnnnnnnnnnnnnnnnnnnnnnnnnnnnnnnnnnnnnnnnnnnnnnnnnnnnnnnnnnnnnnnnnnnnnnnnnnnnnnnnnnnnnnnnnnnnnnnnnnnnnnnnnnnnnnnnnnnnnnnnnnnnnnnnnnnnnnnnnnnnnnnnnnnnnnnnnnnnnnnnnnnnnnnnnnnnnnnnnnnnnnnnnnnnnnnnnnnnnnnnnnnnnnnnnnnnnnnnnnnnnnnnnnnnnnnnnnnnnnnnnnnnnnnnnnnnnnnnnnnnnnnnnnnnnnnnnnnnnnnnnnnnnnnnnnnnnnnnnnnnnnnnnnnnnnnnnnnnnnnnnnnnnnnnnnnnnnnnnnnnnnnnnnnnnnnnnnnnnnnnnnnnnnnnnnnnnnnnnnnnnnnnnnnnnnnnnnnnnnnnnnnnnnnnnnnnnnnnnnnnnnnnnnnnnnnnnnnnnnnnnnnnnnnnnnnnnnnnnnnnnnnnnnnnnnnnnnnnnnnnnnnnnnnnnnnnnnnnnnnnnnnnnnnnnnnnnnnnnnnnnnnnnnnnnnnnnnnnnnnnnnnnnnnnnnnnnnnnnnnnnnnnnnnnnnnnnnnnnnnnnnnnnnnnnnnnnnnnnnnnnnnnnnnnnnnnnnnnnnnnnnnnnnnnnnnnnnnnnnnnnnnnnnnnnnnnnnnnnnnnnnnnnnnnnnnnnnnnnnnnnnnnnnnnnnnnnnnnnnnnnnnnnnnnnnnnnnnnnnnnnnnnnnnnnnnnnnnnnnnnnnnnnnnnnnnnnnnnnnnnnnnnnnnnnnnnnnnnnnnnnnnnnnnnnnnnnnnnnnnnnnnnnnnnnnnnnnnnnnnnnnnnnnnnnnnnnnnnnnnnnnnnnnnnnnnnnnnnnnnnnnnnnnnnnnnnnnnnnnnnnnnnnnnnnnnnnnnnnnnnnnnnnnnnnnnnnnnnnnnnnnnnnnnnnnnnnnnnnnnnnnnnnnnnnnnnnnnnnnnnnnnnnnnnnnnnnnnnnnnnnnnnnnnnnnnnnnnnnnnnnnnnnnnnnnnnnnnnnnnnnnnnnnnnnnnnnnnnnnnnnnnnnnnnnnnnnnnnnnnnnnnnnnnnnnnnnnnnnnnnnnnnnnnnnnnnnnnnnnnnnnnnnnnnnnnnnnnnnnnnnnnnnnnnnnnnnnnnnnnnnnnnnnnnnnnnnnnnnnnnnnnnnnnnnnnnnnnnnnnnnnnnnnnnnnnnnnnnnnnnnnnnnnnnnnnnnnnnnnnnnnnnnnnnnnnnnnnnnnnnnnnnnnnnnnnnnnnnnnnnnnnnnnnnnnnnnnnnnnnnnnnnnnnnnnnnnnnnnnnnnnnnnnnnnnnnnnnnnnnnnnnnnnnnnnnnnnnnnnnnnnnnnnnnnnnnnnnnnnnnnnnnnnnnnnnnnnnnnnnnnnnnnnnnnnnnnnnnnnnnnnnnnnnnnnnnnnnnnnnnnnnnnnnnnnnnnnnnnnnnnnnnnnnnnnnnnnnnnnnnnnnnnnnnnnnnnnnnnnnnnnnnnnnnnnnnnnnnnnnnnnnnnnnnnnnnnnnnnnnnnnnnnnnnnnnnnnnnnnnnnnnnnnnnnnnnnnnnnnnnnnnnnnnnnnnnnnnnnnnnnnnnnnnnnnnnnnnnnnnnnnnnnnnnnnnnnnnnnnnnnnnnnnnnnnnnnnnnnnnnnnnnnnnnnnnnnnnnnnnnnnnnnnnnnnnnnnnnnnnnnnnnnnnnnnnnnnnnnnnnnnnnnnnnnnnnnnnnnnnnnnnnnnnnnnnnnnnnnnnnnnnnnnnnnnnnnnnnnnnnnnnnnnnnnnnnnnnnnnnnnnnnnnnnnnnnnnnnnnnnnnnnnnnnnnnnnnnnnnnnnnnnnnnnnnnnnnnnnnnnnnnnnnnnnnnnnnnnnnnnnnnnnnnnnnnnnnnnnnnnnnnnnnnnnnnnnnnnnnnnnnnnnnnnnnnnnnnnnnnnnnnnnnnnnnnnnnnnnnnnnnnnnnnnnnnnnnnnnnnnnnnnnnnnnnnnnnnnnnnnnnnnnnnnnnnnnnnnnnnnnnnnnnnnnnnnnnnnnnnnnnnnnnnnnnnnnnnnnnnnnnnnnnnnnnnnnnnnnnnnnnnnnnnnnnnnnnnnnnnnnnnnnnnnnnnnnnnnnnnnnnnnnnnnnnnnnnnnnnnnnnnnnnnnnnnnnnnnnnnnnnnnnnnnnnnnnnnnnnnnnnnnnnnnnnnnnnnnnnnnnnnnnnnnnnnnnnnnnnnnnnnnnnnnnnnnnnnnnnnnnnnnnnnnnnnnnnnnnnnnnnnnnnnnnnnnnnnnnnnnnnnnnnnnnnnnnnnnnnnnnnnnnnnnnnnnnnnnnnnnnnnnnnnnnnnnnnnnnnnnnnnnnnnnnnnnnnnnnnnnnnnnnnnnnnnnnnnnnnnnnnnnnnnnnnnnnnnnnnnnnnnnnnnnnnnnnnnnnnnnnnnnnnnnnnnnnnnnnnnnnnnnnnnnnnnnnnnnnnnnnnnnnnnnnnnnnnnnnnnnnnnnnnnnnnnnnnnnnnnnnnnnnnnnnnnnnnnnnnnnnnnnnnnnnnnnnnnnnnnnnnnnnnnnnnnnnnnnnnnnnnnnnnnnnnnnnnnnnnnnnnnnnnnnnnnnnnnnnnnnnnnnnnnnnnnnnnnnnnnnnnnnnnnnnnnnnnnnnnnnnnnnnnnnnnnnnnnnnnnnnnnnnnnnnnnnnnnnnnnnnnnnnnnnnnnnnnnnnnnnnnnnnnnnnnnnnnnnnnnnnnnnnnnnnnnnnnnnnnnnnnnnnnnnnnnnnnnnnnnnnnnnnnnnnnnnnnnnnnnnnnnnnnnnnnnnnnnnnnnnnnnnnnnnnnnnnnnnnnnnnnnnnnnnnnnnnnnnnnnnnnnnnnnnnnnnnnnnnnnnnnnnnnnnnnnnnnnnnnnnnnnnnnnnnnnnnnnnnnnnnnnnnnnnnnnnnnnnnnnnnnnnnnnnnnnnnnnnnnnnnnnnnnnnnnnnnnnnnnnnnnnnnnnnnnnnnnnnnnnnnnnnnnnnnnnnnnnnnnnnnnnnnnnnnnnnnnnnnnnnnnnnnnnnnnnnnnnnnnnnnnnnnnnnnnnnnnnnnnnnnnnnnnnnnnnnnnnnnnnnnnnnnnnnnnnnnnnnnnnnnnnnnnnnnnnnnnnnnnnnnnnnnnnnnnnnnnnnnnnnnnnnnnnnnnnnnnnnnnnnnnnnnnnnnnnnnnnnnnnnnnnnnnnnnnnnnnnnnnnnnnnnnnnnnnnnnnnnnnnnnnnnnnnnnnnnnnnnnnnnnnnnnnnnnnnnnnnnnnnnnnnnnnnnnnnnnnnnnnnnnnnnnnnnnnnnnnnnnnnnnnnnnnnnnnnnnnnnnnnnnnnnnnnnnnnnnnnnnnnnnnnnnnnnnnnnnnnnnnnnnnnnnnnnnnnnnnnnnnnnnnnnnnnnnnnnnnnnnnnnnnnnnnnnnnnnnnnnnnnnnnnnnnnnnnnnnnnnnnnnnnnnnnnnnnnnnnnnnnnnnnnnnnnnnnnnnnnnnnnnnnnnnnnnnnnnnnnnnnnnnnnnnnnnnnnnnnnnnnnnnnnnnnnnnnnnnnnnnnnnnnnnnnnnnnnnnnnnnnnnnnnnnnnnnnnnnnnnnnnnnnnnnnnnnnnnnnnnnnnnnnnnnnnnnnnnnnnnnnnnnnnnnnnnnnnnnnnnnnnnnnnnnnnnnnnnnnnnnnnnnnnnnnnnnnnnnnnnnnnnnnnnnnnnnnnnnnnnnnnnnnnnnnnnnnnnnnnnnnnnnnnnnnnnnnnnnnnnnnnnnnnnnnnnnnnnnnnnnnnnnnnnnnnnnnnnnnnnnnnnnnnnnnnnnnnnnnnnnnnnnnnnnnnnnnnnnnnnnnnnnnnnnnnnnnnnnnnnnnnnnnnnnnnnnnnnnnnnnnnnnnnnnnnnnnnnnnnnnnnnnnnnnnnnnnnnnnnnnnnnnnnnnnnnnnnnnnnnnnnnnnnnnnnnnnnnnnnnnnnnnnnnnnnnnnnnnnnnnnnnnnnnnnnnnnnnnnnnnnnnnnnnnnnnnnnnnnnnnnnnnnnnnnnnnnnnnnnnnnnnnnnnnnnnnnnnnnnnnnnnnnnnnnnnnnnnnnnnnnnnnnnnnnnnnnnnnnnnnnnnnnnnnnnnnnnnnnnnnnnnnnnnnnnnnnnnnnnnnnnnnnnnnnnnnnnnnnnnnnnnnnnnnnnnnnnnnnnnnnnnnnnnnnnnnnnnnnnnnnnnnnnnnnnnnnnnnnnnnnnnnnnnnnnnnnnnnnnnnnnnnnnnnnnnnnnnnnnnnnnnnnnnnnnnnnnnnnnnnnnnnnnnnnnnnnnnnnnnnnnnnnnnnnnnnnnnnnnnnnnnnnnnnnnnnnnnnnnnnnnnnnnnnnnnnnnnnnnnnnnnnnnnnnnnnnnnnnnnnnnnnnnnnnnnnnnnnnnnnnnnnnnnnnnnnnnnnnnnnnnnnnnnnnnnnnnnnnnnnnnnnnnnnnnnnnnnnnnnnnnnnnnnnnnnnnnnnnnnnnnnnnnnnnnnnnnnnnnnnnnnnnnnnnnnnnnnnnnnnnnnnnnnnnnnnnnnnnnnnnnnnnnnnnnnnnnnnnnnnnnnnnnnnnnnnnnnnnnnnnnnnnnnnnnnnnnnnnnnnnnnnnnnnnnnnnnnnnnnnnnnnnnnnnnnnnnnnnnnnnnnnnnnnnnnnnnnnnnnnnnnnnnnnnnnnnnnnnnnnnnnnnnnnnnnnnnnnnnnnnnnnnnnnnnnnnnnnnnnnnnnnnnnnnnnnnnnnnnnnnnnnnnnnnnnnnnnnnnnnnnnnnnnnnnnnnnnnnnnnnnnnnnnnnnnnnnnnnnnnnnnnnnnnnnnnnnnnnnnnnnnnnnnnnnnnnnnnnnnnnnnnnnnnnnnnnnnnnnnnnnnnnnnnnnnnnnnnnnnnnnnnnnnnnnnnnnnnnnnnnnnnnnnnnnnnnnnnnnnnnnnnnnnnnnnnnnnnnnnnnnnnnnnnnnnnnnnnnnnnnnnnnnnnnnnnnnnnnnnnnnnnnnnnnnnnnnnnnnnnnnnnnnnnnnnnnnnnnnnnnnnnnnnnnnnnnnnnnnnnnnnnnnnnnnnnnnnnnnnnnnnnnnnnnnnnnnnnnnnnnnnnnnnnnnnnnnnnnnnnnnnnnnnnnnnnnnnnnnnnnnnnnnnnnnnnnnnnnnnnnnnnnnnnnnnnnnnnnnnnnnnnnnnnnnnnnnnnnnnnnnnnnnnnnnnnnnnnnnnnnnnnnnnnnnnnnnnnnnnnnnnnnnnnnnnnnnnnnnnnnnnnnnnnnnnnnnnnnnnnnnnnnnnnnnnnnnnnnnnnnnnnnnnnnnnnnnnnnnnnnnnnnnnnnnnnnnnnnnnnnnnnnnnnnnnnnnnnnnnnnnnnnnnnnnnnnnnnnnnnnnnnnnnnnnnnnnnnnnnnnnnnnnnnnnnnnnnnnnnnnnnnnnnnnnnnnnnnnnnnnnnnnnnnnnnnnnnnnnnnnnnnnnnnnnnnnnnnnnnnnnnnnnnnnnnnnnnnnnnnnnnnnnnnnnnnnnnnnnnnnnnnnnnnnnnnnnnnnnnnnnnnnnnnnnnnnnnnnnnnnnnnnnnnnnnnnnnnnnnnnnnnnnnnnnnnnnnnnnnnnnnnnnnnnnnnnnnnnnnnnnnnnnnnnnnnnnnnnnnnnnnnnnnnnnnnnnnnnnnnnnnnnnnnnnnnnnnnnnnnnnnnnnnnnnnnnnnnnnnnnnnnnnnnnnnnnnnnnnnnnnnnnnnnnnnnnnnnnnnnnnnnnnnnnnnnnnnnnnnnnnnnnnnnnnnnnnnnnnnnnnnnnnnnnnnnnnnnnnnnnnnnnnnnnnnnnnnnnnnnnnnnnnnnnnnnnnnnnnnnnnnnnnnnnnnnnnnnnnnnnnnnnnnnnnnnnnnnnnnnnnnnnnnnnnnnnnnnnnnnnnnnnnnnnnnnnnnnnnnnnnnnnnnnnnnnnnnnnnnnnnnnnnnnnnnnnnnnnnnnnnnnnnnnnnnnnnnnnnnnnnnnnnnnnnnnnnnnnnnnnnnnnnnnnnnnnnnnnnnnnnnnnnnnnnnnnnnnnnnnnnnnnnnnnnnnnnnnnnnnnnnnnnnnnnnnnnnnnnnnnnnnnnnnnnnnnnnnnnnnnnnnnnnnnnnnnnnnnnnnnnnnnnnnnnnnnnnnnnnnnnnnnnnnnnnnnnnnnnnnnnnnnnnnnnnnnnnnnnnnnnnnnnnnnnnnnnnnnnnnnnnnnnnnnnnnnnnnnnnnnnnnnnnnnnnnnnnnnnnnnnnnnnnnnnnnnnnnnnnnnnnnnnnnnnnnnnnnnnnnnnnnnnnnnnnnnnnnnnnnnnnnnnnnnnnnnnnnnnnnnnnnnnnnnnnnnnnnnnnnnnnnnnnnnnnnnnnnnnnnnnnnnnnnnnnnnnnnnnnnnnnnnnnnnnnnnnnnnnnnnnnnnnnnnnnnnnnnnnnnnnnnnnnnnnnnnnnnnnnnnnnnnnnnnnnnnnnnnnnnnnnnnnnnnnnnnnnnnnnnnnnnnnnnnnnnnnnnnnnnnnnnnnnnnnnnnnnnnnnnnnnnnnnnnnnnnnnnnnnnnnnnnnnnnnnnnnnnnnnnnnnnnnnnnnnnnnnnnnnnnnnnnnnnnnnnnnnnnnnnnnnnnnnnnnnnnnnnnnnnnnnnnnnnnnnnnnnnnnnnnnnnnnnnnnnnnnnnnnnnnnnnnnnnnnnnnnnnnnnnnnnnnnnnnnnnnnnnnnnnnnnnnnnnnnnnnnnnnnnnnnnnnnnnnnnnnnnnnnnnnnnnnnnnnnnnnnnnnnnnnnnnnnnnnnnnnnnnnnnnnnnnnnnnnnnnnnnnnnnnnnnnnnnnnnnnnnnnnnnnnnnnnnnnnnnnnnnnnnnnnnnnnnnnnnnnnnnnnnnnnnnnnnnnnnnnnnnnnnnnnnnnnnnnnnnnnnnnnnnnnnnnnnnnnnnnnnnnnnnnnnnnnnnnnnnnnnnnnnnnnnnnnnnnnnnnnnnnnnnnnnnnnnnnnnnnnnnnnnnnnnnnnnnnnnnnnnnnnnnnnnnnnnnnnnnnnnnnnnnnnnnnnnnnnnnnnnnnnnnnnnnnnnnnnnnnnnnnnnnnnnnnnnnnnnnnnnnnnnnnnnnnnnnnnnnnnnnnnnnnnnnnnnnnnnnnnnnnnnnnnnnnnnnnnnnnnnnnnnnnnnnnnnnnnnnnnnnnnnnnnnnnnnnnnnnnnnnnnnnnnnnnnnnnnnnnnnnnnnnnnnnnnnnnnnnnnnnnnnnnnnnnnnnnnnnnnnnnnnnnnnnnnnnnnnnnnnnnnnnnnnnnnnnnnnnnnnnnnnnnnnnnnnnnnnnnnnnnnnnnnnnnnnnnnnnnnnnnnnnnnnnnnnnnnnnnnnnnnnnnnnnnnnnnnnnnnnnnnnnnnnnnnnnnnnnnnnnnnnnnnnnnnnnnnnnnnnnnnnnnnnnnnnnnnnnnnnnnnnnnnnnnnnnnnnnnnnnnnnnnnnnnnnnnnnnnnnnnnnnnnnnnnnnnnnnnnnnnnnnnnnnnnnnnnnnnnnnnnnnnnnnnnnnnnnnnnnnnnnnnnnnnnnnnnnnnnnnnnnnnnnnnnnnnnnnnnnnnnnnnnnnnnnnnnnnnnnnnnnnnnnnnnnnnnnnnnnnnnnnnnnnnnnnnnnnnnnnnnnnnnnnnnnnnnnnnnnnnnnnnnnnnnnnnnnnnnnnnnnnnnnnnnnnnnnnnnnnnnnnnnnnnnnnnnnnnnnnnnnnnnnnnnnnnnnnnnnnnnnnnnnnnnnnnnnnnnnnnnnnnnnnnnnnnnnnnnnnnnnnnnnnnnnnnnnnnnnnnnnnnnnnnnnnnnnnnnnnnnnnnnnnnnnnnnnnnnnnnnnnnnnnnnnnnnnnnnnnnnnnnnnnnnnnnnnnnnnnnnnnnnnnnnnnnnnnnnnnnnnnnnnnnnnnnnnnnnnnnnnnnnnnnnnnnnnnnnnnnnnnnnnnnnnnnnnnnnnnnnnnnnnnnnnnnnnnnnnnnnnnnnnnnnnnnnnnnnnnnnnnnnnnnnnnnnnnnnnnnnnnnnnnnnnnnnnnnnnnnnnnnnnnnnnnnnnnnnnnnnnnnnnnnnnnnnnnnnnnnnnnnnnnnnnnnnnnnnnnnnnnnnnnnnnnnnnnnnnnnnnnnnnnnnnnnnnnnnnnnnnnnnnnnnnnnnnnnnnnnnnnnnnnnnnnnnnnnnnnnnnnnnnnnnnnnnnnnnnnnnnnnnnnnnnnnnnnnnnnnnnnnnnnnnnnnnnnnnnnnnnnnnnnnnnnnnnnnnnnnnnnnnnnnnnnnnnnnnnnnnnnnnnnnnnnnnnnnnnnnnnnnnnnnnnnnnnnnnnnnnnnnnnnnnnnnnnnnnnnnnnnnnnnnnnnnnnnnnnnnnnnnnnnnnnnnnnnnnnnnnnnnnnnnnnnnnnnnnnnnnnnnnnnnnnnnnnnnnnnnnnnnnnnnnnnnnnnnnnnnnnnnnnnnnnnnnnnnnnnnnnnnnnnnnnnnnnnnnnnnnnnnnnnnnnnnnnnnnnnnnnnnnnnnnnnnnnnnnnnnnnnnnnnnnnnnnnnnnnnnnnnnnnnnnnnnnnnnnnnnnnnnnnnnnnnnnnnnnnnnnnnnnnnnnnnnnnnnnnnnnnnnnnnnnnnnnnnnnnnnnnnnnnnnnnnnnnnnnnnnnnnnnnnnnnnnnnnnnnnnnnnnnnnnnnnnnnnnnnnnnnnnnnnnnnnnnnnnnnnnnnnnnnnnnnnnnnnnnnnnnnnnnnnnnnnnnnnnnnnnnnnnnnnnnnnnnnnnnnnnnnnnnnnnnnnnnnnnnnnnnnnnnnnnnnnnnnnnnnnnnnnnnnnnnnnnnnnnnnnnnnnnnnnnnnnnnnnnnnnnnnnnnnnnnnnnnnnnnnnnnnnnnnnnnnnnnnnnnnnnnnnnnnnnnnnnnnnnnnnnnnnnnnnnnnnnnnnnnnnnnnnnnnnnnnnnnnnnnnnnnnnnnnnnnnnnnnnnnnnnnnnnnnnnnnnnnnnnnnnnnnnnnnnnnnnnnnnnnnnnnnnnnnnnnnnnnnnnnnnnnnnnnnnnnnnnnnnnnnnnnnnnnnnnnnnnnnnnnnnnnnnnnnnnnnnnnnnnnnnnnnnnnnnnnnnnnnnnnnnnnnnnnnnnnnnnnnnnnnnnnnnnnnnnnnnnnnnnnnnnnnnnnnnnnnnnnnnnnnnnnnnnnnnnnnnnnnnnnnnnnnnnnnnnnnnnnnnnnnnnnnnnnnnnnnnnnnnnnnnnnnnnnnnnnnnnnnnnnnnnnnnnnnnnnnnnnnnnnnnnnnnnnnnnnnnnnnnnnnnnnnnnnnnnnnnnnnnnnnnnnnnnnnnnnnnnnnnnnnnnnnnnnnnnnnnnnnnnnnnnnnnnnnnnnnnnnnnnnnnnnnnnnnnnnnnnnnnnnnnnnnnnnnnnnnnnnnnnnnnnnnnnnnnnnnnnnnnnnnnnnnnnnnnnnnnnnnnnnnnnnnnnnnnnnnnnnnnnnnnnnnnnnnnnnnnnnnnnnnnnnnnnnnnnnnnnnnnnnnnnnnnnnnnnnnnnnnnnnnnnnnnnnnnnnnnnnnnnnnnnnnnnnnnnnnnnnnnnnnnnnnnnnnnnnnnnnnnnnnnnnnnnnnnnnnnnnnnnnnnnnnnnnnnnnnnnnnnnnnnnnnnnnnnnnnnnnnnnnnnnnnnnnnnnnnnnnnnnnnnnnnnnnnnnnnnnnnnnnnnnnnnnnnnnnnnnnnnnnnnnnnnnnnnnnnnnnnnnnnnnnnnnnnnnnnnnnnnnnnnnnnnnnnnnnnnnnnnnnnnnnnnnnnnnnnnnnnnnnnnnnnnnnnnnnnnnnnnnnnnnnnnnnnnnnnnnnnnnnnnnnnnnnnnnnnnnnnnnnnnnnnnnnnnnnnnnnnnnnnnnnnnnnnnnnnnnnnnnnnnnnnnnnnnnnnnnnnnnnnnnnnnnnnnnnnnnnnnnnnnnnnnnnnnnnnnnnnnnnnnnnnnnnnnnnnnnnnnnnnnnnnnnnnnnnnnnnnnnnnnnnnnnnnnnnnnnnnnnnnnnnnnnnnnnnnnnnnnnnnnnnnnnnnnnnnnnnnnnnnnnnnnnnnnnnnnnnnnnnnnnnnnnnnnnnnnnnnnnnnnnnnnnnnnnnnnnnnnnnnnnnnnnnnnnnnnnnnnnnnnnnnnnnnnnnnnnnnnnnnnnnnnnnnnnnnnnnnnnnnnnnnnnnnnnnnnnnnnnnnnnnnnnnnnnnnnnnnnnnnnnnnnnnnnnnnnnnnnnnnnnnnnnnnnnnnnnnnnnnnnnnnnnnnnnnnnnnnnnnnnnnnnnnnnnnnnnnnnnnnnnnnnnnnnnnnnnnnnnnnnnnnnnnnnnnnnnnnnnnnnnnnnnnnnnnnnnnnnnnnnnnnnnnnnnnnnnnnnnnnnnnnnnnnnnnnnnnnnnnnnnnnnnnnnnnnnnnnnnnnnnnnnnnnnnnnnnnnnnnnnnnnnnnnnnnnnnnnnnnnnnnnnnnnnnnnnnnnnnnnnnnnnnnnnnnnnnnnnnnnnnnnnnnnnnnnnnnnnnnnnnnnnnnnnnnnnnnnnnnnnnnnnnnnnnnnnnnnnnnnnnnnnnnnnnnnnnnnnnnnnnnnnnnnnnnnnnnnnnnnnnnnnnnnnnnnnnnnnnnnnnnnnnnnnnnnnnnnnnnnnnnnnnnnnnnnnnnnnnnnnnnnnnnnnnnnnnnnnnnnnnnnnnnnnnnnnnnnnnnnnnnnnnnnnnnnnnnnnnnnnnnnnnnnnnnnnnnnnnnnnnnnnnnnnnnnnnnnnnnnnnnnnnnnnnnnnnnnnnnnnnnnnnnnnnnnnnnnnnnnnnnnnnnnnnnnnnnnnnnnnnnnnnnnnnnnnnnnnnnnnnnnnnnnnnnnnnnnnnnnnnnnnnnnnnnnnnnnnnnnnnnnnnnnnnnnnnnnnnnnnnnnnnnnnnnnnnnnnnnnnnnnnnnnnnnnnnnnnnnnnnnnnnnnnnnnnnnnnnnnnnnnnnnnnnnnnnnnnnnnnnnnnnnnnnnnnnnnnnnnnnnnnnnnnnnnnnnnnnnnnnnnnnnnnnnnnnnnnnnnnnnnnnnnnnnnnnnnnnnnnnnnnnnnnnnnnnnnnnnnnnnnnnnnnnnnnnnnnnnnnnnnnnnnnnnnnnnnnnnnnnnnnnnnnnnnnnnnnnnnnnnnnnnnnnnnnnnnnnnnnnnnnnnnnnnnnnnnnnnnnnnnnnnnnnnnnnnnnnnnnnnnnnnnnnnnnnnnnnnnnnnnnnnnnnnnnnnnnnnnnnnnnnnnnnnnnnnnnnnnnnnnnnnnnnnnnnnnnnnnnnnnnnnnnnnnnnnnnnnnnnnnnnnnnnnnnnnnnnnnnnnnnnnnnnnnnnnnnnnnnnnnnnnnnnnnnnnnnnnnnnnnnnnnnnnnnnnnnnnnnnnnnnnnnnnnnnnnnnnnnnnnnnnnnnnnnnnnnnnnnnnnnnnnnnnnnnnnnnnnnnnnnnnnnnnnnnnnnnnnnnnnnnnnnnnnnnnnnnnnnnnnnnnnnnnnnnnnnnnnnnnnnnnnnnnnnnnnnnnnnnnnnnnnnnnnnnnnnnnnnnnnnnnnnnnnnnnnnnnnnnnnnnnnnnnnnnnnnnnnnnnnnnnnnnnnnnnnnnnnnnnnnnnnnnnnnnnnnnnnnnnnnnnnnnnnnnnnnnnnnnnnnnnnnnnnnnnnnnnnnnnnnnnnnnnnnnnnnnnnnnnnnnnnnnnnnnnnnnnnnnnnnnnnnnnnnnnnnnnnnnnnnnnnnnnnnnnnnnnnnnnnnnnnnnnnnnnnnnnnnnnnnnnnnnnnnnnnnnnnnnnnnnnnnnnnnnnnnnnnnnnnnnnnnnnnnnnnnnnnnnnnnnnnnnnnnnnnnnnnnnnnnnnnnnnnnnnnnnnnnnnnnnnnnnnnnnnnnnnnnnnnnnnnnnnnnnnnnnnnnnnnnnnnnnnnnnnnnnnnnnnnnnnnnnnnnnnnnnnnnnnnnnnnnnnnnnnnnnnnnnnnnnnnnnnnnnnnnnnnnnnnnnnnnnnnnnnnnnnnnnnnnnnnnnnnnnnnnnnnnnnnnnnnnnnnnnnnnnnnnnnnnnnnnnnnnnnnnnnnnnnnnnnnnnnnnnnnnnnnnnnnnnnnnnnnnnnnnnnnnnnnnnnnnnnnnnnnnnnnnnnnnnnnnnnnnnnnnnnnnnnnnnnnnnnnnnnnnnnnnnnnnnnnnnnnnnnnnnnnnnnnnnnnnnnnnnnnnnnnnnnnnnnnnnnnnnnnnnnnnnnnnnnnnnnnnnnnnnnnnnnnnnnnnnnnnnnnnnnnnnnnnnnnnnnnnnnnnnnnnnnnnnnnnnnnnnnnnnnnnnnnnnnnnnnnnnnnnnnnnnnnnnnnnnnnnnnnnnnnnnnnnnnnnnnnnnnnnnnnnnnnnnnnnnnnnnnnnnnnnnnnnnnnnnnnnnnnnnnnnnnnnnnnnnnnnnnnnnnnnnnnnnnnnnnnnnnnnnnnnnnnnnnnnnnnnnnnnnnnnnnnnnnnnnnnnnnnnnnnnnnnnnnnnnnnnnnnnnnnnnnnnnnnnnnnnnnnnnnnnnnnnnnnnnnnnnnnnnnnnnnnnnnnnnnnnnnnnnnnnnnnnnnnnnnnnnnnnnnnnnnnnnnnnnnnnnnnnnnnnnnnnnnnnnnnnnnnnnnnnnnnnnnnnnnnnnnnnnnnnnnnnnnnnnnnnnnnnnnnnnnnnnnnnnnnnnnnnnnnnnnnnnnnnnnnnnnnnnnnnnnnnnnnnnnnnnnnnnnnnnnnnnnnnnnnnnnnnnnnnnnnnnnnnnnnnnnnnnnnnnnnnnnnnnnnnnnnnnnnnnnnnnnnnnnnnnnnnnnnnnnnnnnnnnnnnnnnnnnnnnnnnnnnnnnnnnnnnnnnnnnnnnnnnnnnnnnnnnnnnnnnnnnnnnnnnnnnnnnnnnnnnnnnnnnnnnnnnnnnnnnnnnnnnnnnnnnnnnnnnnnnnnnnnnnnnnnnnnnnnnnnnnnnnnnnnnnnnnnnnnnnnnnnnnnnnnnnnnnnnnnnnnnnnnnnnnnnnnnnnnnnnnnnnnnnnnnnnnnnnnnnnnnnnnnnnnnnnnnnnnnnnnnnnnnnnnnnnnnnnnnnnnnnnnnnnnnnnnnnnnnnnnnnnnnnnnnnnnnnnnnnnnnnnnnnnnnnnnnnnnnnnnnnnnnnnnnnnnnnnnnnnnnnnnnnnnnnnnnnnnnnnnnnnnnnnnnnnnnnnnnnnnnnnnnnnnnnnnnnnnnnnnnnnnnnnnnnnnnnnnnnnnnnnnnnnnnnnnnnnnnnnnnnnnnnnnnnnnnnnnnnnnnnnnnnnnnnnnnnnnnnnnnnnnnnnnnnnnnnnnnnnnnnnnnnnnnnnnnnnnnnnnnnnnnnnnnnnnnnnnnnnnnnnnnnnnnnnnnnnnnnnnnnnnnnnnnnnnnnnnnnnnnnnnnnnnnnnnnnnnnnnnnnnnnnnnnnnnnnnnnnnnnnnnnnnnnnnnnnnnnnnnnnnnnnnnnnnnnnnnnnnnnnnnnnnnnnnnnnnnnnnnnnnnnnnnnnnnnnnnnnnnnnnnnnnnnnnnnnnnnnnnnnnnnnnnnnnnnnnnnnnnnnnnnnnnnnnnnnnnnnnnnnnnnnnnnnnnnnnnnnnnnnnnnnnnnnnnnnnnnnnnnnnnnnnnnnnnnnnnnnnnnnnnnnnnnnnnnnnnnnnnnnnnnnnnnnnnnnnnnnnnnnnnnnnnnnnnnnnnnnnnnnnnnnnnnnnnnnnnnnnnnnnnnnnnnnnnnnnnnnnnnnnnnnnnnnnnnnnnnnnnnnnnnnnnnnnnnnnnnnnnnnnnnnnnnnnnnnnnnnnnnnnnnnnnnnnnnnnnnnnnnnnnnnnnnnnnnnnnnnnnnnnnnnnnnnnnnnnnnnnnnnnnnnnnnnnnnnnnnnnnnnnnnnnnnnnnnnnnnnnnnnnnnnnnnnnnnnnnnnnnnnnnnnnnnnnnnnnnnnnnnnnnnnnnnnnnnnnnnnnnnnnnnnnnnnnnnnnnnnnnnnnnnnnnnnnnnnnnnnnnnnnnnnnnnnnnnnnnnnnnnnnnnnnnnnnnnnnnnnnnnnnnnnnnnnnnnnnnnnnnnnnnnnnnnnnnnnnnnnnnnnnnnnnnnnnnnnnnnnnnnnnnnnnnnnnnnnnnnnnnnnnnnnnnnnnnnnnnnnnnnnnnnnnnnnnnnnnnnnnnnnnnnnnnnnnnnnnnnnnnnnnnnnnnnnnnnnnnnnnnnnnnnnnnnnnnnnnnnnnnnnnnnnnnnnnnnnnnnnnnnnnnnnnnnnnnnnnnnnnnnnnnnnnnnnnnnnnnnnnnnnnnnnnnnnnnnnnnnnnnnnnnnnnnnnnnnnnnnnnnnnnnnnnnnnnnnnnnnnnnnnnnnnnnnnnnnnnnnnnnnnnnnnnnnnnnnnnnnnnnnnnnnnnnnnnnnnnnnnnnnnnnnnnnnnnnnnnnnnnnnnnnnnnnnnnnnnnnnnnnnnnnnnnnnnnnnnnnnnnnnnnnnnnnnnnnnnnnnnnnnnnnnnnnnnnnnnnnnnnnnnnnnnnnnnnnnnnnnnnnnnnnnnnnnnnnnnnnnnnnnnnnnnnnnnnnnnnnnnnnnnnnnnnnnnnnnnnnnnnnnnnnnnnnnnnnnnnnnnnnnnnnnnnnnnnnnnnnnnnnnnnnnnnnnnnnnnnnnnnnnnnnnnnnnnnnnnnnnnnnnnnnnnnnnnnnnnnnnnnnnnnnnnnnnnnnnnnnnnnnnnnnnnnnnnnnnnnnnnnnnnnnnnnnnnnnnnnnnnnnnnnnnnnnnnnnnnnnnnnnnnnnnnnnnnnnnnnnnnnnnnnnnnnnnnnnnnnnnnnnnnnnnnnnnnnnnnnnnnnnnnnnnnnnnnnnnnnnnnnnnnnnnnnnnnnnnnnnnnnnnnnnnnnnnnnnnnnnnnnnnnnnnnnnnnnnnnnnnnnnnnnnnnnnnnnnnnnnnnnnnnnnnnnnnnnnnnnnnnnnnnnnnnnnnnnnnnnnnnnnnnnnnnnnnnnnnnnnnnnnnnnnnnnnnnnnnnnnnnnnnnnnnnnnnnnnnnnnnnnnnnnnnnnnnnnnnnnnnnnnnnnnnnnnnnnnnnnnnnnnnnnnnnnnnnnnnnnnnnnnnnnnnnnnnnnnnnnnnnnnnnnnnnnnnnnnnnnnnnnnnnnnnnnnnnnnnnnnnnnnnnnnnnnnnnnnnnnnnnnnnnnnnnnnnnnnnnnnnnnnnnnnnnnnnnnnnnnnnnnnnnnnnnnnnnnnnnnnnnnnnnnnnnnnnnnnnnnnnnnnnnnnnnnnnnnnnnnnnnnnnnnnnnnnnnnnnnnnnnnnnnnnnnnnnnnnnnnnnnnnnnnnnnnnnnnnnnnnnnnnnnnnnnnnnnnnnnnnnnnnnnnnnnnnnnnnnnnnnnnnnnnnnnnnnnnnnnnnnnnnnnnnnnnnnnnnnnnnnnnnnnnnnnnnnnnnnnnnnnnnnnnnnnnnnnnnnnnnnnnnnnnnnnnnnnnnnnnnnnnnnnnnnnnnnnnnnnnnnnnnnnnnnnnnnnnnnnnnnnnnnnnnnnnnnnnnnnnnnnnnnnnnnnnnnnnnnnnnnnnnnnnnnnnnnnnnnnnnnnnnnnnnnnnnnnnnnnnnnnnnnnnnnnnnnnnnnnnnnnnnnnnnnnnnnnnnnnnnnnnnnnnnnnnnnnnnnnnnnnnnnnnnnnnnnnnnnnnnnnnnnnnnnnnnnnnnnnnnnnnnnnnnnnnnnnnnnnnnnnnnnnnnnnnnnnnnnnnnnnnnnnnnnnnnnnnnnnnnnnnnnnnnnnnnnnnnnnnnnnnnnnnnnnnnnnnnnnnnnnnnnnnnnnnnnnnnnnnnnnnnnnnnnnnnnnnnnnnnnnnnnnnnnnnnnnnnnnnnnnnnnnnnnnnnnnnnnnnnnnnnnnnnnnnnnnnnnnnnnnnnnnnnnnnnnnnnnnnnnnnnnnnnnnnnnnnnnnnnnnnnnnnnnnnnnnnnnnnnnnnnnnnnnnnnnnnnnnnnnnnnnnnnnnnnnnnnnnnnnnnnnnnnnnnnnnnnnnnnnnnnnnnnnnnnnnnnnnnnnnnnnnnnnnnnnnnnnnnnnnnnnnnnnnnnnnnnnnnnnnnnnnnnnnnnnnnnnnnnnnnnnnnnnnnnnnnnnnnnnnnnnnnnnnnnnnnnnnnnnnnnnnnnnnnnnnnnnnnnnnnnnnnnnnnnnnnnnnnnnnnnnnnnnnnnnnnnnnnnnnnnnnnnnnnnnnnnnnnnnnnnnnnnnnnnnnnnnnnnnnnnnnnnnnnnnnnnnnnnnnnnnnnnnnnnnnnnnnnnnnnnnnnnnnnnnnnnnnnnnnnnnnnnnnnnnnnnnnnnnnnnnnnnnnnnnnnnnnnnnnnnnnnnnnnnnnnnnnnnnnnnnnnnnnnnnnnnnnnnnnnnnnnnnnnnnnnnnnnnnnnnnnnnnnnnnnnnnnnnnnnnnnnnnnnnnnnnnnnnnnnnnnnnnnnnnnnnnnnnnnnnnnnnnnnnnnnnnnnnnnnnnnnnnnnnnnnnnnnnnnnnnnnnnnnnnnnnnnnnnnnnnnnnnnnnnnnnnnnnnnnnnnnnnnnnnnnnnnnnnnnnnnnnnnnnnnnnnnnnnnnnnnnnnnnnnnnnnnnnnnnnnnnnnnnnnnnnnnnnnnnnnnnnnnnnnnnnnnnnnnnnnnnnnnnnnnnnnnnnnnnnnnnnnnnnnnnnnnnnnnnnnnnnnnnnnnnnnnnnnnnnnnnnnnnnnnnnnnnnnnnnnnnnnnnnnnnnnnnnnnnnnnnnnnnnnnnnnnnnnnnnnnnnnnnnnnnnnnnnnnnnnnnnnnnnnnnnnnnnnnnnnnnnnnnnnnnnnnnnnnnnnnnnnnnnnnnnnnnnnnnnnnnnnnnnnnnnnnnnnnnnnnnnnnnnnnnnnnnnnnnnnnnnnnnnnnnnnnnnnnnnnnnnnnnnnnnnnnnnnnnnnnnnnnnnnnnnnnnnnnnnnnnnnnnnnnnnnnnnnnnnnnnnnnnnnnnnnnnnnnnnnnnnnnnnnnnnnnnnnnnnnnnnnnnnnnnnnnnnnnnnnnnnnnnnnnnnnnnnnnnnnnnnnnnnnnnnnnnnnnnnnnnnnnnnnnnnnnnnnnnnnnnnnnnnnnnnnnnnnnnnnnnnnnnnnnnnnnnnnnnnnnnnnnnnnnnnnnnnnnnnnnnnnnnnnnnnnnnnnnnnnnnnnnnnnnnnnnnnnnnnnnnnnnnnnnnnnnnnnnnnnnnnnnnnnnnnnnnnnnnnnnnnnnnnnnnnnnnnnnnnnnnnnnnnnnnnnnnnnnnnnnnnnnnnnnnnnnnnnnnnnnnnnnnnnnnnnnnnnnnnnnnnnnnnnnnnnnnnnnnnnnnnnnnnnnnnnnnnnnnnnnnnnnnnnnnnnnnnnnnnnnnnnnnnnnnnnnnnnnnnnnnnnnnnnnnnnnnnnnnnnnnnnnnnnnnnnnnnnnnnnnnnnnnnnnnnnnnnnnnnnnnnnnnnnnnnnnnnnnnnnnnnnnnnnnnnnnnnnnnnnnnnnnnnnnnnnnnnnnnnnnnnnnnnnnnnnnnnnnnnnnnnnnnnnnnnnnnnnnnnnnnnnnnnnnnnnnnnnnnnnnnnnnnnnnnnnnnnnnnnnnnnnnnnnnnnnnnnnnnnnnnnnnnnnnnnnnnnnnnnnnnnnnnnnnnnnnnnnnnnnnnnnnnnnnnnnnnnnnnnnnnnnnnnnnnnnnnnnnnnnnnnnnnnnnnnnnnnnnnnnnnnnnnnnnnnnnnnnnnnnnnnnnnnnnnnnnnnnnnnnnnnnnnnnnnnnnnnnnnnnnnnnnnnnnnnnnnnnnnnnnnnnnnnnnnnnnnnnnnnnnnnnnnnnnnnnnnnnnnnnnnnnnnnnnnnnnnnnnnnnnnnnnnnnnnnnnnnnnnnnnnnnnnnnnnnnnnnnnnnnnnnnnnnnnnnnnnnnnnnnnnnnnnnnnnnnnnnnnnnnnnnnnnnnnnnnnnnnnnnnnnnnnnnnnnnnnnnnnnnnnnnnnnnnnnnnnnnnnnnnnnnnnnnnnnnnnnnnnnnnnnnnnnnnnnnnnnnnnnnnnnnnnnnnnnnnnnnnnnnnnnnnnnnnnnnnnnnnnnnnnnnnnnnnnnnnnnnnnnnnnnnnnnnnnnnnnnnnnnnnnnnnnnnnnnnnnnnnnnnnnnnnnnnnnnnnnnnnnnnnnnnnnnnnnnnnnnnnnnnnnnnnnnnnnnnnnnnnnnnnnnnnnnnnnnnnnnnnnnnnnnnnnnnnnnnnnnnnnnnnnnnnnnnnnnnnnnnnnnnnnnnnnnnnnnnnnnnnnnnnnnnnnnnnnnnnnnnnnnnnnnnnnnnnnnnnnnnnnnnnnnnnnnnnnnnnnnnnnnnnnnnnnnnnnnnnnnnnnnnnnnnnnnnnnnnnnnnnnnnnnnnnnnnnnnnnnnnnnnnnnnnnnnnnnnnnnnnnnnnnnnnnnnnnnnnnnnnnnnnnnnnnnnnnnnnnnnnnnnnnnnnnnnnnnnnnnnnnnnnnnnnnnnnnnnnnnnnnnnnnnnnnnnnnnnnnnnnnnnnnnnnnnnnnnnnnnnnnnnnnnnnnnnnnnnnnnnnnnnnnnnnnnnnnnnnnnnnnnnnnnnnnnnnnnnnnnnnnnnnnnnnnnnnnnnnnnnnnnnnnnnnnnnnnnnnnnnnnnnnnnnnnnnnnnnnnnnnnnnnnnnnnnnnnnnnnnnnnnnnnnnnnnnnnnnnnnnnnnnnnnnnnnnnnnnnnnnnnnnnnnnnnnnnnnnnnnnnnnnnnnnnnnnnnnnnnnnnnnnnnnnnnnnnnnnnnnnnnnnnnnnnnnnnnnnnnnnnnnnnnnnnnnnnnnnnnnnnnnnnnnnnnnnnnnnnnnnnnnnnnnnnnnnnnnnnnnnnnnnnnnnnnnnnnnnnnnnnnnnnnnnnnnnnnnnnnnnnnnnnnnnnnnnnnnnnnnnnnnnnnnnnnnnnnnnnnnnnnnnnnnnnnnnnnnnnnnnnnnnnnnnnnnnnnnnnnnnnnnnnnnnnnnnnnnnnnnnnnnnnnnnnnnnnnnnnnnnnnnnnnnnnnnnnnnnnnnnnnnnnnnnnnnnnnnnnnnnnnnnnnnnnnnnnnnnnnnnnnnnnnnnnnnnnnnnnnnnnnnnnnnnnnnnnnnnnnnnnnnnnnnnnnnnnnnnnnnnnnnnnnnnnnnnnnnnnnnnnnnnnnnnnnnnnnnnnnnnnnnnnnnnnnnnnnnnnnnnnnnnnnnnnnnnnnnnnnnnnnnnnnnnnnnnnnnnnnnnnnnnnnnnnnnnnnnnnnnnnnnnnnnnnnnnnnnnnnnnnnnnnnnnnnnnnnnnnnnnnnnnnnnnnnnnnnnnnnnnnnnnnnnnnnnnnnnnnnnnnnnnnnnnnnnnnnnnnnnnnnnnnnnnnnnnnnnnnnnnnnnnnnnnnnnnnnnnnnnnnnnnnnnnnnnnnnnnnnnnnnnnnnnnnnnnnnnnnnnnnnnnnnnnnnnnnnnnnnnnnnnnnnnnnnnnnnnnnnnnnnnnnnnnnnnnnnnnnnnnnnnnnnnnnnnnnnnnnnnnnnnnnnnnnnnnnnnnnnnnnnnnnnnnnnnnnnnnnnnnnnnnnnnnnnnnnnnnnnnnnnnnnnnnnnnnnnnnnnnnnnnnnnnnnnnnnnnnnnnnnnnnnnnnnnnnnnnnnnnnnnnnnnnnnnnnnnnnnnnnnnnnnnnnnnnnnnnnnnnnnnnnnnnnnnnnnnnnnnnnnnnnnnnnnnnnnnnnnnnnnnnnnnnnnnnnnnnnnnnnnnnnnnnnnnnnnnnnnnnnnnnnnnnnnnnnnnnnnnnnnnnnnnnnnnnnnnnnnnnnnnnnnnnnnnnnnnnnnnnnnnnnnnnnnnnnnnnnnnnnnnnnnnnnnnnnnnnnnnnnnnnnnnnnnnnnnnnnnnnnnnnnnnnnnnnnnnnnnnnnnnnnnnnnnnnnnnnnnnnnnnnnnnnnnnnnnnnnnnnnnnnnnnnnnnnnnnnnnnnnnnnnnnnnnnnnnnnnnnnnnnnnnnnnnnnnnnnnnnnnnnnnnnnnnnnnnnnnnnnnnnnnnnnnnnnnnnnnnnnnnnnnnnnnnnnnnnnnnnnnnnnnnnnnnnnnnnnnnnnnnnnnnnnnnnnnnnnnnnnnnnnnnnnnnnnnnnnnnnnnnnnnnnnnnnnnnnnnnnnnnnnnnnnnnnnnnnnnnnnnnnnnnnnnnnnnnnnnnnnnnnnnnnnnnnnnnnnnnnnnnnnnnnnnnnnnnnnnnnnnnnnnnnnnnnnnnnnnnnnnnnnnnnnnnnnnnnnnnnnnnnnnnnnnnnnnnnnnnnnnnnnnnnnnnnnnnnnnnnnnnnnnnnnnnnnnnnnnnnnnnnnnnnnnnnnnnnnnnnnnnnnnnnnnnnnnnnnnnnnnnnnnnnnnnnnnnnnnnnnnnnnnnnnnnnnnnnnnnnnnnnnnnnnnnnnnnnnnnnnnnnnnnnnnnnnnnnnnnnnnnnnnnnnnnnnnnnnnnnnnnnnnnnnnnnnnnnnnnnnnnnnnnnnnnnnnnnnnnnnnnnnnnnnnnnnnnnnnnnnnnnnnnnnnnnnnnnnnnnnnnnnnnnnnnnnnnnnnnnnnnnnnnnnnnnnnnnnnnnnnnnnnnnnnnnnnnnnnnnnnnnnnnnnnnnnnnnnnnnnnnnnnnnnnnnnnnnnnnnnnnnnnnnnnnnnnnnnnnnnnnnnnnnnnnnnnnnnnnnnnnnnnnnnnnnnnnnnnnnnnnnnnnnnnnnnnnnnnnnnnnnnnnnnnnnnnnnnnnnnnnnnnnnnnnnnnnnnnnnnnnnnnnnnnnnnnnnnnnnnnnnnnnnnnnnnnnnnnnnnnnnnnnnnnnnnnnnnnnnnnnnnnnnnnnnnnnnnnnnnnnnnnnnnnnnnnnnnnnnnnnnnnnnnnnnnnnnnnnnnnnnnnnnnnnnnnnnnnnnnnnnnnnnnnnnnnnnnnnnnnnnnnnnnnnnnnnnnnnnnnnnnnnnnnnnnnnnnnnnnnnnnnnnnnnnnnnnnnnnnnnnnnnnnnnnnnnnnnnnnnnnnnnnnnnnnnnnnnnnnnnnnnnnnnnnnnnnnnnnnnnnnnnnnnnnnnnnnnnnnnnnnnnnnnnnnnnnnnnnnnnnnnnnnnnnnnnnnnnnnnnnnnnnnnnnnnnnnnnnnnnnnnnnnnnnnnnnnnnnnnnnnnnnnnnnnnnnnnnnnnnnnnnnnnnnnnnnnnnnnnnnnnnnnnnnnnnnnnnnnnnnnnnnnnnnnnnnnnnnnnnnnnnnnnnnnnnnnnnnnnnnnnnnnnnnnnnnnnnnnnnnnnnnnnnnnnnnnnnnnnnnnnnnnnnnnnnnnnnnnnnnnnnnnnnnnnnnnnnnnnnnnnnnnnnnnnnnnnnnnnnnnnnnnnnnnnnnnnnnnnnnnnnnnnnnnnnnnnnnnnnnnnnnnnnnnnnnnnnnnnnnnnnnnnnnnnnnnnnnnnnnnnnnnnnnnnnnnnnnnnnnnnnnnnnnnnnnnnnnnnnnnnnnnnnnnnnnnnnnnnnnnnnnnnnnnnnnnnnnnnnnnnnnnnnnnnnnnnnnnnnnnnnnnnnnnnnnnnnnnnnnnnnnnnnnnnnnnnnnnnnnnnnnnnnnnnnnnnnnnnnnnnnnnnnnnnnnnnnnnnnnnnnnnnnnnnnnnnnnnnnnnnnnnnnnnnnnnnnnnnnnnnnnnnnnnnnnnnnnnnnnnnnnnnnnnnnnnnnnnnnnnnnnnnnnnnnnnnnnnnnnnnnnnnnnnnnnnnnnnnnnnnnnnnnnnnnnnnnnnnnnnnnnnnnnnnnnnnnnnnnnnnnnnnnnnnnnnnnnnnnnnnnnnnnnnnnnnnnnnnnnnnnnnnnnnnnnnnnnnnnnnnnnnnnnnnnnnnnnnnnnnnnnnnnnnnnnnnnnnnnnnnnnnnnnnnnnnnnnnnnnnnnnnnnnnnnnnnnnnnnnnnnnnnnnnnnnnnnnnnnnnnnnnnnnnnnnnnnnnnnnnnnnnnnnnnnnnnnnnnnnnnnnnnnnnnnnnnnnnnnnnnnnnnnnnnnnnnnnnnnnnnnnnnnnnnnnnnnnnnnnnnnnnnnnnnnnnnnnnnnnnnnnnnnnnnnnnnnnnnnnnnnnnnnnnnnnnnnnnnnnnnnnnnnnnnnnnnnnnnnnnnnnnnnnnnnnnnnnnnnnnnnnnnnnnnnnnnnnnnnnnnnnnnnnnnnnnnnnnnnnnnnnnnnnnnnnnnnnnnnnnnnnnnnnnnnnnnnnnnnnnnnnnnnnnnnnnnnnnnnnnnnnnnnnnnnnnnnnnnnnnnnnnnnnnnnnnnnnnnnnnnnnnnnnnnnnnnnnnnnnnnnnnnnnnnnnnnnnnnnnnnnnnnnnnnnnnnnnnnnnnnnnnnnnnnnnnnnnnnnnnnnnnnnnnnnnnnnnnnnnnnnnnnnnnnnnnnnnnnnnnnnnnnnnnnnnnnnnnnnnnnnnnnnnnnnnnnnnnnnnnnnnnnnnnnnnnnnnnnnnnnnnnnnnnnnnnnnnnnnnnnnnnnnnnnnnnnnnnnnnnnnnnnnnnnnnnnnnnnnnnnnnnnnnnnnnnnnnnnnnnnnnnnnnnnnnnnnnnnnnnnnnnnnnnnnnnnnnnnnnnnnnnnnnnnnnnnnnnnnnnnnnnnnnnnnnnnnnnnnnnnnnnnnnnnnnnnnnnnnnnnnnnnnnnnnnnnnnnnnnnnnnnnnnnnnnnnnnnnnnnnnnnnnnnnnnnnnnnnnnnnnnnnnnnnnnnnnnnnnnnnnnnnnnnnnnnnnnnnnnnnnnnnnnnnnnnnnnnnnnnnnnnnnnnnnnnnnnnnnnnnnnnnnnnnnnnnnnnnnnnnnnnnnnnnnnnnnnnnnnnnnnnnnnnnnnnnnnnnnnnnnnnnnnnnnnnnnnnnnnnnnnnnnnnnnnnnnnnnnnnnnnnnnnnnnnnnnnnnnnnnnnnnnnnnnnnnnnnnnnnnnnnnnnnnnnnnnnnnnnnnnnnnnnnnnnnnnnnnnnnnnnnnnnnnnnnnnnnnnnnnnnnnnnnnnnnnnnnnnnnnnnnnnnnnnnnnnnnnnnnnnnnnnnnnnnnnnnnnnnnnnnnnnnnnnnnnnnnnnnnnnnnnnnnnnnnnnnnnnnnnnnnnnnnnnnnnnnnnnnnnnnnnnnnnnnnnnnnnnnnnnnnnnnnnnnnnnnnnnnnnnnnnnnnnnnnnnnnnnnnnnnnnnnnnnnnnnnnnnnnnnnnnnnnnnnnnnnnnnnnnnnnnnnnnnnnnnnnnnnnnnnnnnnnnnnnnnnnnnnnnnnnnnnnnnnnnnnnnnnnnnnnnnnnnnnnnnnnnnnnnnnnnnnnnnnnnnnnnnnnnnnnnnnnnnnnnnnnnnnnnnnnnnnnnnnnnnnnnnnnnnnnnnnnnnnnnnnnnnnnnnnnnnnnnnnnnnnnnnnnnnnnnnnnnnnnnnnnnnnnnnnnnnnnnnnnnnnnnnnnnnnnnnnnnnnnnnnnnnnnnnnnnnnnnnnnnnnnnnnnnnnnnnnnnnnnnnnnnnnnnnnnnnnnnnnnnnnnnnnnnnnnnnnnnnnnnnnnnnnnnnnnnnnnnnnnnnnnnnnnnnnnnnnnnnnnnnnnnnnnnnnnnnnnnnnnnnnnnnnnnnnnnnnnnnnnnnnnnnnnnnnnnnnnnnnnnnnnnnnnnnnnnnnnnnnnnnnnnnnnnnnnnnnnnnnnnnnnnnnnnnnnnnnnnnnnnnnnnnnnnnnnnnnnnnnnnnnnnnnnnnnnnnnnnnnnnnnnnnnnnnnnnnnnnnnnnnnnnnnnnnnnnnnnnnnnnnnnnnnnnnnnnnnnnnnnnnnnnnnnnnnnnnnnnnnnnnnnnnnnnnnnnnnnnnnnnnnnnnnnnnnnnnnnnnnnnnnnnnnnnnnnnnnnnnnnnnnnnnnnnnnnnnnnnnnnnnnnnnnnnnnnnnnnnnnnnnnnnnnnnnnnnnnnnnnnnnnnnnnnnnnnnnnnnnnnnnnnnnnnnnnnnnnnnnnnnnnnnnnnnnnnnnnnnnnnnnnnnnnnnnnnnnnnnnnnnnnnnnnnnnnnnnnnnnnnnnnnnnnnnnnnnnnnnnnnnnnnnnnnnnnnnnnnnnnnnnnnnnnnnnnnnnnnnnnnnnnnnnnnnnnnnnnnnnnnnnnnnnnnnnnnnnnnnnnnnnnnnnnnnnnnnnnnnnnnnnnnnnnnnnnnnnnnnnnnnnnnnnnnnnnnnnnnnnnnnnnnnnnnnnnnnnnnnnnnnnnnnnnnnnnnnnnnnnnnnnnnnnnnnnnnnnnnnnnnnnnnnnnnnnnnnnnnnnnnnnnnnnnnnnnnnnnnnnnnnnnnnnnnnnnnnnnnnnnnnnnnnnnnnnnnnnnnnnnnnnnnnnnnnnnnnnnnnnnnnnnnnnnnnnnnnnnnnnnnnnnnnnnnnnnnnnnnnnnnnnnnnnnnnnnnnnnnnnnnnnnnnnnnnnnnnnnnnnnnnnnnnnnnnnnnnnnnnnnnnnnnnnnnnnnnnnnnnnnnnnnnnnnnnnnnnnnnnnnnnnnnnnnnnnnnnnnnnnnnnnnnnnnnnnnnnnnnnnnnnnnnnnnnnnnnnnnnnnnnnnnnnnnnnnnnnnnnnnnnnnnnnnnnnnnnnnnnnnnnnnnnnnnnnnnnnnnnnnnnnnnnnnnnnnnnnnnnnnnnnnnnnnnnnnnnnnnnnnnnnnnnnnnnnnnnnnnnnnnnnnnnnnnnnnnnnnnnnnnnnnnnnnnnnnnnnnnnnnnnnnnnnnnnnnnnnnnnnnnnnnnnnnnnnnnnnnnnnnnnnnnnnnnnnnnnnnnnnnnnnnnnnnnnnnnnnnnnnnnnnnnnnnnnnnnnnnnnnnnnnnnnnnnnnnnnnnnnnnnnnnnnnnnnnnnnnnnnnnnnnnnnnnnnnnnnnnnnnnnnnnnnnnnnnnnnnnnnnnnnnnnnnnnnnnnnnnnnnnnnnnnnnnnnnnnnnnnnnnnnnnnnnnnnnnnnnnnnnnnnnnnnnnnnnnnnnnnnnnnnnnnnnnnnnnnnnnnnnnnnnnnnnnnnnnnnnnnnnnnnnnnnnnnnnnnnnnnnnnnnnnnnnnnnnnnnnnnnnnnnnnnnnnnnnnnnnnnnnnnnnnnnnnnnnnnnnnnnnnnnnnnnnnnnnnnnnnnnnnnnnnnnnnnnnnnnnnnnnnnnnnnnnnnnnnnnnnnnnnnnnnnnnnnnnnnnnnnnnnnnnnnnnnnnnnnnnnnnnnnnnnnnnnnnnnnnnnnnnnnnnnnnnnnnnnnnnnnnnnnnnnnnnnnnnnnnnnnnnnnnnnnnnnnnnnnnnnnnnnnnnnnnnnnnnnnnnnnnnnnnnnnnnnnnnnnnnnnnnnnnnnnnnnnnnnnnnnnnnnnnnnnnnnnnnnnnnnnnnnnnnnnnnnnnnnnnnnnnnnnnnnnnnnnnnnnnnnnnnnnnnnnnnnnnnnnnnnnnnnnnnnnnnnnnnnnnnnnnnnnnnnnnnnnnnnnnnnnnnnnnnnnnnnnnnnnnnnnnnnnnnnnnnnnnnnnnnnnnnnnnnnnnnnnnnnnnnnnnnnnnnnnnnnnnnnnnnnnnnnnnnnnnnnnnnnnnnnnnnnnnnnnnnnnnnnnnnnnnnnnnnnnnnnnnnnnnnnnnnnnnnnnnnnnnnnnnnnnnnnnnnnnnnnnnnnnnnnnnnnnnnnnnnnnnnnnnnnnnnnnnnnnnnnnnnnnnnnnnnnnnnnnnnnnnnnnnnnnnnnnnnnnnnnnnnnnnnnnnnnnnnnnnnnnnnnnnnnnnnnnnnnnnnnnnnnnnnnnnnnnnnnnnnnnnnnnnnnnnnnnnnnnnnnnnnnnnnnnnnnnnnnnnnnnnnnnnnnnnnnnnnnnnnnnnnnnnnnnnnnnnnnnnnnnnnnnnnnnnnnnnnnnnnnnnnnnnnnnnnnnnnnnnnnnnnnnnnnnnnnnnnnnnnnnnnnnnnnnnnnnnnnnnnnnnnnnnnnnnnnnnnnnnnnnnnnnnnnnnnnnnnnnnnnnnnnnnnnnnnnnnnnnnnnnnnnnnnnnnnnnnnnnnnnnnnnnnnnnnnnnnnnnnnnnnnnnnnnnnnnnnnnnnnnnnnnnnnnnnnnnnnnnnnnnnnnnnnnnnnnnnnnnnnnnnnnnnnnnnnnnnnnnnnnnnnnnnnnnnnnnnnnnnnnnnnnnnnnnnnnnnnnnnnnnnnnnnnnnnnnnnnnnnnnnnnnnnnnnnnnnnnnnnnnnnnnnnnnnnnnnnnnnnnnnnnnnnnnnnnnnnnnnnnnnnnnnnnnnnnnnnnnnnnnnnnnnnnnnnnnnnnnnnnnnnnnnnnnnnnnnnnnnnnnnnnnnnnnnnnnnnnnnnnnnnnnnnnnnnnnnnnnnnnnnnnnnnnnnnnnnnnnnnnnnnnnnnnnnnnnnnnnnnnnnnnnnnnnnnnnnnnnnnnnnnnnnnnnnnnnnnnnnnnnnnnnnnnnnnnnnnnnnnnnnnnnnnnnnnnnnnnnnnnnnnnnnnnnnnnnnnnnnnnnnnnnnnnnnnnnnnnnnnnnnnnnnnnnnnnnnnnnnnnnnnnnnnnnnnnnnnnnnnnnnnnnnnnnnnnnnnnnnnnnnnnnnnnnnnnnnnnnnnnnnnnnnnnnnnnnnnnnnnnnnnnnnnnnnnnnnnnnnnnnnnnnnnnnnnnnnnnnnnnnnnnnnnnnnnnnnnnnnnnnnnnnnnnnnnnnnnnnnnnnnnnnnnnnnnnnnnnnnnnnnnnnnnnnnnnnnnnnnnnnnnnnnnnnnnnnnnnnnnnnnnnnnnnnnnnnnnnnnnnnnnnnnnnnnnnnnnnnnnnnnnnnnnnnnnnnnnnnnnnnnnnnnnnnnnnnnnnnnnnnnnnnnnnnnnnnnnnnnnnnnnnnnnnnnnnnnnnnnnnnnnnnnnnnnnnnnnnnnnnnnnnnnnnnnnnnnnnnnnnnnnnnnnnnnnnnnnnnnnnnnnnnnnnnnnnnnnnnnnnnnnnnnnnnnnnnnnnnnnnnnnnnnnnnnnnnnnnnnnnnnnnnnnnnnnnnnnnnnnnnnnnnnnnnnnnnnnnnnnnnnnnnnnnnnnnnnnnnnnnnnnnnnnnnnnnnnnnnnnnnnnnnnnnnnnnnnnnnnnnnnnnnnnnnnnnnnnnnnnnnnnnnnnnnnnnnnnnnnnnnnnnnnnnnnnnnnnnnnnnnnnnnnnnnnnnnnnnnnnnnnnnnnnnnnnnnnnnnnnnnnnnnnnnnnnnnnnnnnnnnnnnnnnnnnnnnnnnnnnnnnnnnnnnnnnnnnnnnnnnnnnnnnnnnnnnnnnnnnnnnnnnnnnnnnnnnnnnnnnnnnnnnnnnnnnnnnnnnnnnnnnnnnnnnnnnnnnnnnnnnnnnnnnnnnnnnnnnnnnnnnnnnnnnnnnnnnnnnnnnnnnnnnnnnnnnnnnnnnnnnnnnnnnnnnnnnnnnnnnnnnnnnnnnnnnnnnnnnnnnnnnnnnnnnnnnnnnnnnnnnnnnnnnnnnnnnnnnnnnnnnnnnnnnnnnnnnnnnnnnnnnnnnnnnnnnnnnnnnnnnnnnnnnnnnnnnnnnnnnnnnnnnnnnnnnnnnnnnnnnnnnnnnnnnnnnnnnnnnnnnnnnnnnnnnnnnnnnnnnnnnnnnnnnnnnnnnnnnnnnnnnnnnnnnnnnnnnnnnnnnnnnnnnnnnnnnnnnnnnnnnnnnnnnnnnnnnnnnnnnnnnnnnnnnnnnnnnnnnnnnnnnnnnnnnnnnnnnnnnnnnnnnnnnnnnnnnnnnnnnnnnnnnnnnnnnnnnnnnnnnnnnnnnnnnnnnnnnnnnnnnnnnnnnnnnnnnnnnnnnnnnnnnnnnnnnnnnnnnnnnnnnnnnnnnnnnnnnnnnnnnnnnnnnnnnnnnnnnnnnnnnnnnnnnnnnnnnnnnnnnnnnnnnnnnnnnnnnnnnnnnnnnnnnnnnnnnnnnnnnnnnnnnnnnnnnnnnnnnnnnnnnnnnnnnnnnnnnnnnnnnnnnnnnnnnnnnnnnnnnnnnnnnnnnnnnnnnnnnnnnnnnnnnnnnnnnnnnnnnnnnnnnnnnnnnnnnnnnnnnnnnnnnnnnnnnnnnnnnnnnnnnnnnnnnnnnnnnnnnnnnnnnnnnnnnnnnnnnnnnnnnnnnnnnnnnnnnnnnnnnnnnnnnnnnnnnnnnnnnnnnnnnnnnnnnnnnnnnnnnnnnnnnnnnnnnnnnnnnnnnnnnnnnnnnnnnnnnnnnnnnnnnnnnnnnnnnnnnnnnnnnnnnnnnnnnnnnnnnnnnnnnnnnnnnnnnnnnnnnnnnnnnnnnnnnnnnnnnnnnnnnnnnnnnnnnnnnnnnnnnnnnnnnnnnnnnnnnnnnnnnnnnnnnnnnnnnnnnnnnnnnnnnnnnnnnnnnnnnnnnnnnnnnnnnnnnnnnnnnnnnnnnnnnnnnnnnnnnnnnnnnnnnnnnnnnnnnnnnnnnnnnnnnnnnnnnnnnnnnnnnnnnnnnnnnnnnnnnnnnnnnnnnnnnnnnnnnnnnnnnnnnnnnnnnnnnnnnnnnnnnnnnnnnnnnnnnnnnnnnnnnnnnnnnnnnnnnnnnnnnnnnnnnnnnnnnnnnnnnnnnnnnnnnnnnnnnnnnnnnnnnnnnnnnnnnnnnnnnnnnnnnnnnnnnnnnnnnnnnnnnnnnnnnnnnnnnnnnnnnnnnnnnnnnnnnnnnnnnnnnnnnnnnnnnnnnnnnnnnnnnnnnnnnnnnnnnnnnnnnnnnnnnnnnnnnnnnnnnnnnnnnnnnnnnnnnnnnnnnnnnnnnnnnnnnnnnnnnnnnnnnnnnnnnnnnnnnnnnnnnnnnnnnnnnnnnnnnnnnnnnnnnnnnnnnnnnnnnnnnnnnnnnnnnnnnnnnnnnnnnnnnnnnnnnnnnnnnnnnnnnnnnnnnnnnnnnnnnnnnnnnnnnnnnnnnnnnnnnnnnnnnnnnnnnnnnnnnnnnnnnnnnnnnnnnnnnnnnnnnnnnnnnnnnnnnnnnnnnnnnnnnnnnnnnnnnnnnnnnnnnnnnnnnnnnnnnnnnnnnnnnnnnnnnnnnnnnnnnnnnnnnnnnnnnnnnnnnnnnnnnnnnnnnnnnnnnnnnnnnnnnnnnnnnnnnnnnnnnnnnnnnnnnnnnnnnnnnnnnnnnnnnnnnnnnnnnnnnnnnnnnnnnnnnnnnnnnnnnnnnnnnnnnnnnnnnnnnnnnnnnnnnnnnnnnnnnnnnnnnnnnnnnnnnnnnnnnnnnnnnnnnnnnnnnnnnnnnnnnnnnnnnnnnnnnnnnnnnnnnnnnnnnnnnnnnnnnnnnnnnnnnnnnnnnnnnnnnnnnnnnnnnnnnnnnnnnnnnnnnnnnnnnnnnnnnnnnnnnnnnnnnnnnnnnnnnnnnnnnnnnnnnnnnnnnnnnnnnnnnnnnnnnnnnnnnnnnnnnnnnnnnnnnnnnnnnnnnnnnnnnnnnnnnnnnnnnnnnnnnnnnnnnnnnnnnnnnnnnnnnnnnnnnnnnnnnnnnnnnnnnnnnnnnnnnnnnnnnnnnnnnnnnnnnnnnnnnnnnnnnnnnnnnnnnnnnnnnnnnnnnnnnnnnnnnnnnnnnnnnnnnnnnnnnnnnnnnnnnnnnnnnnnnnnnnnnnnnnnnnnnnnnnnnnnnnnnnnnnnnnnnnnnnnnnnnnnnnnnnnnnnnnnnnnnnnnnnnnnnnnnnnnnnnnnnnnnnnnnnnnnnnnnnnnnnnnnnnnnnnnnnnnnnnnnnnnnnnnnnnnnnnnnnnnnnnnnnnnnnnnnnnnnnnnnnnnnnnnnnnnnnnnnnnnnnnnnnnnnnnnnnnnnnnnnnnnnnnnnnnnnnnnnnnnnnnnnnnnnnnnnnnnnnnnnnnnnnnnnnnnnnnnnnnnnnnnnnnnnnnnnnnnnnnnnnnnnnnnnnnnnnnnnnnnnnnnnnnnnnnnnnnnnnnnnnnnnnnnnnnnnnnnnnnnnnnnnnnnnnnnnnnnnnnnnnnnnnnnnnnnnnnnnnnnnnnnnnnnnnnnnnnnnnnnnnnnnnnnnnnnnnnnnnnnnnnnnnnnnnnnnnnnnnnnnnnnnnnnnnnnnnnnnnnnnnnnnnnnnnnnnnnnnnnnnnnnnnnnnnnnnnnnnnnnnnnnnnnnnnnnnnnnnnnnnnnnnnnnnnnnnnnnnnnnnnnnnnnnnnnnnnnnnnnnnnnnnnnnnnnnnnnnnnnnnnnnnnnnnnnnnnnnnnnnnnnnnnnnnnnnnnnnnnnnnnnnnnnnnnnnnnnnnnnnnnnnnnnnnnnnnnnnnnnnnnnnnnnnnnnnnnnnnnnnnnnnnnnnnnnnnnnnnnnnnnnnnnnnnnnnnnnnnnnnnnnnnnnnnnnnnnnnnnnnnnnnnnnnnnnnnnnnnnnnnnnnnnnnnnnnnnnnnnnnnnnnnnnnnnnnnnnnnnnnnnnnnnnnnnnnnnnnnnnnnnnnnnnnnnnnnnnnnnnnnnnnnnnnnnnnnnnnnnnnnnnnnnnnnnnnnnnnnnnnnnnnnnnnnnnnnnnnnnnnnnnnnnnnnnnnnnnnnnnnnnnnnnnnnnnnnnnnnnnnnnnnnnnnnnnnnnnnnnnnnnnnnnnnnnnnnnnnnnnnnnnnnnnnnnnnnnnnnnnnnnnnnnnnnnnnnnnnnnnnnnnnnnnnnnnnnnnnnnnnnnnnnnnnnnnnnnnnnnnnnnnnnnnnnnnnnnnnnnnnnnnnnnnnnnnnnnnnnnnnnnnnnnnnnnnnnnnnnnnnnnnnnnnnnnnnnnnnnnnnnnnnnnnnnnnnnnnnnnnnnnnnnnnnnnnnnnnnnnnnnnnnnnnnnnnnnnnnnnnnnnnnnnnnnnnnnnnnnnnnnnnnnnnnnnnnnnnnnnnnnnnnnnnnnnnnnnnnnnnnnnnnnnnnnnnnnnnnnnnnnnnnnnnnnnnnnnnnnnnnnnnnnnnnnnnnnnnnnnnnnnnnnnnnnnnnnnnnnnnnnnnnnnnnnnnnnnnnnnnnnnnnnnnnnnnnnnnnnnnnnnnnnnnnnnnnnnnnnnnnnnnnnnnnnnnnnnnnnnnnnnnnnnnnnnnnnnnnnnnnnnnnnnnnnnnnnnnnnnnnnnnnnnnnnnnnnnnnnnnnnnnnnnnnnnnnnnnnnnnnnnnnnnnnnnnnnnnnnnnnnnnnnnnnnnnnnnnnnnnnnnnnnnnnnnnnnnnnnnnnnnnnnnnnnnnnnnnnnnnnnnnnnnnnnnnnnnnnnnnnnnnnnnnnnnnnnnnnnnnnnnnnnnnnnnnnnnnnnnnnnnnnnnnnnnnnnnnnnnnnnnnnnnnnnnnnnnnnnnnnnnnnnnnnnnnnnnnnnnnnnnnnnnnnnnnnnnnnnnnnnnnnnnnnnnnnnnnnnnnnnnnnnnnnnnnnnnnnnnnnnnnnnnnnnnnnnnnnnnnnnnnnnnnnnnnnnnnnnnnnnnnnnnnnnnnnnnnnnnnnnnnnnnnnnnnnnnnnnnnnnnnnnnnnnnnnnnnnnnnnnnnnnnnnnnnnnnnnnnnnnnnnnnnnnnnnnnnnnnnnnnnnnnnnnnnnnnnnnnnnnnnnnnnnnnnnnnnnnnnnnnnnnnnnnnnnnnnnnnnnnnnnnnnnnnnnnnnnnnnnnnnnnnnnnnnnnnnnnnnnnnnnnnnnnnnnnnnnnnnnnnnnnnnnnnnnnnnnnnnnnnnnnnnnnnnnnnnnnnnnnnnnnnnnnnnnnnnnnnnnnnnnnnnnnnnnnnnnnnnnnnnnnnnnnnnnnnnnnnnnnnnnnnnnnnnnnnnnnnnnnnnnnnnnnnnnnnnnnnnnnnnnnnnnnnnnnnnnnnnnnnnnnnnnnnnnnnnnnnnnnnnnnnnnnnnnnnnnnnnnnnnnnnnnnnnnnnnnnnnnnnnnnnnnnnnnnnnnnnnnnnnnnnnnnnnnnnnnnnnnnnnnnnnnnnnnnnnnnnnnnnnnnnnnnnnnnnnnnnnnnnnnnnnnnnnnnnnnnnnnnnnnnnnnnnnnnnnnnnnnnnnnnnnnnnnnnnnnnnnnnnnnnnnnnnnnnnnnnnnnnnnnnnnnnnnnnnnnnnnnnnnnnnnnnnnnnnnnnnnnnnnnnnnnnnnnnnnnnnnnnnnnnnnnnnnnnnnnnnnnnnnnnnnnnnnnnnnnnnnnnnnnnnnnnnnnnnnnnnnnnnnnnnnnnnnnnnnnnnnnnnnnnnnnnnnnnnnnnnnnnnnnnnnnnnnnnnnnnnnnnnnnnnnnnnnnnnnnnnnnnnnnnnnnnnnnnnnnnnnnnnnnnnnnnnnnnnnnnnnnnnnnnnnnnnnnnnnnnnnnnnnnnnnnnnnnnnnnnnnnnnnnnnnnnnnnnnnnnnnnnnnnnnnnnnnnnnnnnnnnnnnnnnnnnnnnnnnnnnnnnnnnnnnnnnnnnnnnnnnnnnnnnnnnnnnnnnnnnnnnnnnnnnnnnnnnnnnnnnnnnnnnnnnnnnnnnnnnnnnnnnnnnnnnnnnnnnnnnnnnnnnnnnnnnnnnnnnnnnnnnnnnnnnnnnnnnnnnnnnnnnnnnnnnnnnnnnnnnnnnnnnnnnnnnnnnnnnnnnnnnnnnnnnnnnnnnnnnnnnnnnnnnnnnnnnnnnnnnnnnnnnnnnnnnnnnnnnnnnnnnnnnnnnnnnnnnnnnnnnnnnnnnnnnnnnnnnnnnnnnnnnnnnnnnnnnnnnnnnnnnnnnnnnnnnnnnnnnnnnnnnnnnnnnnnnnnnnnnnnnnnnnnnnnnnnnnnnnnnnnnnnnnnnnnnnnnnnnnnnnnnnnnnnnnnnnnnnnnnnnnnnnnnnnnnnnnnnnnnnnnnnnnnnnnnnnnnnnnnnnnnnnnnnnnnnnnnnnnnnnnnnnnnnnnnnnnnnnnnnnnnnnnnnnnnnnnnnnnnnnnnnnnnnnnnnnnnnnnnnnnnnnnnnnnnnnnnnnnnnnnnnnnnnnnnnnnnnnnnnnnnnnnnnnnnnnnnnnnnnnnnnnnnnnnnnnnnnnnnnnnnnnnnnnnnnnnnnnnnnnnnnnnnnnnnnnnnnnnnnnnnnnnnnnnnnnnnnnnnnnnnnnnnnnnnnnnnnnnnnnnnnnnnnnnnnnnnnnnnnnnnnnnnnnnnnnnnnnnnnnnnnnnnnnnnnnnnnnnnnnnnnnnnnnnnnnnnnnnnnnnnnnnnnnnnnnnnnnnnnnnnnnnnnnnnnnnnnnnnnnnnnnnnnnnnnnnnnnnnnnnnnnnnnnnnnnnnnnnnnnnnnnnnnnnnnnnnnnnnnnnnnnnnnnnnnnnnnnnnnnnnnnnnnnnnnnnnnnnnnnnnnnnnnnnnnnnnnnnnnnnnnnnnnnnnnnnnnnnnnnnnnnnnnnnnnnnnnnnnnnnnnnnnnnnnnnnnnnnnnnnnnnnnnnnnnnnnnnnnnnnnnnnnnnnnnnnnnnnnnnnnnnnnnnnnnnnnnnnnnnnnnnnnnnnnnnnnnnnnnnnnnnnnnnnnnnnnnnnnnnnnnnnnnnnnnnnnnnnnnnnnnnnnnnnnnnnnnnnnnnnnnnnnnnnnnnnnnnnnnnnnnnnnnnnnnnnnnnnnnnnnnnnnnnnnnnnnnnnnnnnnnnnnnnnnnnnnnnnnnnnnnnnnnnnnnnnnnnnnnnnnnnnnnnnnnnnnnnnnnnnnnnnnnnnnnnnnnnnnnnnnnnnnnnnnnnnnnnnnnnnnnnnnnnnnnnnnnnnnnnnnnnnnnnnnnnnnnnnnnnnnnnnnnnnnnnnnnnnnnnnnnnnnnnnnnnnnnnnnnnnnnnnnnnnnnnnnnnnnnnnnnnnnnnnnnnnnnnnnnnnnnnnnnnnnnnnnnnnnnnnnnnnnnnnnnnnnnnnnnnnnnnnnnnnnnnnnnnnnnnnnnnnnnnnnnnnnnnnnnnnnnnnnnnnnnnnnnnnnnnnnnnnnnnnnnnnnnnnnnnnnnnnnnnnnnnnnnnnnnnnnnnnnnnnnnnnnnnnnnnnnnnnnnnnnnnnnnnnnnnnnnnnnnnnnnnnnnnnnnnnnnnnnnnnnnnnnnnnnnnnnnnnnnnnnnnnnnnnnnnnnnnnnnnnnnnnnnnnnnnnnnnnnnnnnnnnnnnnnnnnnnnnnnnnnnnnnnnnnnnnnnnnnnnnnnnnnnnnnnnnnnnnnnnnnnnnnnnnnnnnnnnnnnnnnnnnnnnnnnnnnnnnnnnnnnnnnnnnnnnnnnnnnnnnnnnnnnnnnnnnnnnnnnnnnnnnnnnnnnnnnnnnnnnnnnnnnnnnnnnnnnnnnnnnnnnnnnnnnnnnnnnnnnnnnnnnnnnnnnnnnnnnnnnnnnnnnnnnnnnnnnnnnnnnnnnnnnnnnnnnnnnnnnnnnnnnnnnnnnnnnnnnnnnnnnnnnnnnnnnnnnnnnnnnnnnnnnnnnnnnnnnnnnnnnnnnnnnnnnnnnnnnnnnnnnnnnnnnnnnnnnnnnnnnnnnnnnnnnnnnnnnnnnnnnnnnnnnnnnnnnnnnnnnnnnnnnnnnnnnnnnnnnnnnnnnnnnnnnnnnnnnnnnnnnnnnnnnnnnnnnnnnnnnnnnnnnnnnnnnnnnnnnnnnnnnnnnnnnnnnnnnnnnnnnnnnnnnnnnnnnnnnnnnnnnnnnnnnnnnnnnnnnnnnnnnnnnnnnnnnnnnnnnnnnnnnnnnnnnnnnnnnnnnnnnnnnnnnnnnnnnnnnnnnnnnnnnnnnnnnnnnnnnnnnnnnnnnnnnnnnnnnnnnnnnnnnnnnnnnnnnnnnnnnnnnnnnnnnnnnnnnnnnnnnnnnnnnnnnnnnnnnnnnnnnnnnnnnnnnnnnnnnnnnnnnnnnnnnnnnnnnnnnnnnnnnnnnnnnnnnnnnnnnnnnnnnnnnnnnnnnnnnnnnnnnnnnnnnnnnnnnnnnnnnnnnnnnnnnnnnnnnnnnnnnnnnnnnnnnnnnnnnnnnnnnnnnnnnnnnnnnnnnnnnnnnnnnnnnnnnnnnnnnnnnnnnnnnnnnnnnnnnnnnnnnnnnnnnnnnnnnnnnnnnnnnnnnnnnnnnnnnnnnnnnnnnnnnnnnnnnnnnnnnnnnnnnnnnnnnnnnnnnnnnnnnnnnnnnnnnnnnnnnnnnnnnnnnnnnnnnnnnnnnnnnnnnnnnnnnnnnnnnnnnnnnnnnnnnnnnnnnnnnnnnnnnnnnnnnnnnnnnnnnnnnnnnnnnnnnnnnnnnnnnnnnnnnnnnnnnnnnnnnnnnnnnnnnnnnnnnnnnnnnnnnnnnnnnnnnnnnnnnnnnnnnnnnnnnnnnnnnnnnnnnnnnnnnnnnnnnnnnnnnnnnnnnnnnnnnnnnnnnnnnnnnnnnnnnnnnnnnnnnnnnnnnnnnnnnnnnnnnnnnnnnnnnnnnnnnnnnnnnnnnnnnnnnnnnnnnnnnnnnnnnnnnnnnnnnnnnnnnnnnnnnnnnnnnnnnnnnnnnnnnnnnnnnnnnnnnnnnnnnnnnnnnnnnnnnnnnnnnnnnnnnnnnnnnnnnnnnnnnnnnnnnnnnnnnnnnnnnnnnnnnnnnnnnnnnnnnnnnnnnnnnnnnnnnnnnnnnnnnnnnnnnnnnnnnnnnnnnnnnnnnnnnnnnnnnnnnnnnnnnnnnnnnnnnnnnnnnnnnnnnnnnnnnnnnnnnnnnnnnnnnnnnnnnnnnnnnnnnnnnnnnnnnnnnnnnnnnnnnnnnnnnnnnnnnnnnnnnnnnnnnnnnnnnnnnnnnnnnnnnnnnnnnnnnnnnnnnnnnnnnnnnnnnnnnnnnnnnnnnnnnnnnnnnnnnnnnnnnnnnnnnnnnnnnnnnnnnnnnnnnnnnnnnnnnnnnnnnnnnnnnnnnnnnnnnnnnnnnnnnnnnnnnnnnnnnnnnnnnnnnnnnnnnnnnnnnnnnnnnnnnnnnnnnnnnnnnnnnnnnnnnnnnnnnnnnnnnnnnnnnnnnnnnnnnnnnnnnnnnnnnnnnnnnnnnnnnnnnnnnnnnnnnnnnnnnnnnnnnnnnnnnnnnnnnnnnnnnnnnnnnnnnnnnnnnnnnnnnnnnnnnnnnnnnnnnnnnnnnnnnnnnnnnnnnnnnnnnnnnnnnnnnnnnnnnnnnnnnnnnnnnnnnnnnnnnnnnnnnnnnnnnnnnnnnnnnnnnnnnnnnnnnnnnnnnnnnnnnnnnnnnnnnnnnnnnnnnnnnnnnnnnnnnnnnnnnnnnnnnnnnnnnnnnnnnnnnnnnnnnnnnnnnnnnnnnnnnnnnnnnnnnnnnnnnnnnnnnnnnnnnnnnnnnnnnnnnnnnnnnnnnnnnnnnnnnnnnnnnnnnnnnnnnnnnnnnnnnnnnnnnnnnnnnnnnnnnnnnnnnnnnnnnnnnnnnnnnnnnnnnnnnnnnnnnnnnnnnnnnnnnnnnnnnnnnnnnnnnnnnnnnnnnnnnnnnnnnnnnnnnnnnnnnnnnnnnnnnnnnnnnnnnnnnnnnnnnnnnnnnnnnnnnnnnnnnnnnnnnnnnnnnnnnnnnnnnnnnnnnnnnnnnnnnnnnnnnnnnnnnnnnnnnnnnnnnnnnnnnnnnnnnnnnnnnnnnnnnnnnnnnnnnnnnnnnnnnnnnnnnnnnnnnnnnnnnnnnnnnnnnnnnnnnnnnnnnnnnnnnnnnnnnnnnnnnnnnnnnnnnnnnnnnnnnnnnnnnnnnnnnnnnnnnnnnnnnnnnnnnnnnnnnnnnnnnnnnnnnnnnnnnnnnnnnnnnnnnnnnnnnnnnnnnnnnnnnnnnnnnnnnnnnnnnnnnnnnnnnnnnnnnnnnnnnnnnnnnnnnnnnnnnnnnnnnnnnnnnnnnnnnnnnnnnnnnnnnnnnnnnnnnnnnnnnnnnnnnnnnnnnnnnnnnnnnnnnnnnnnnnnnnnnnnnnnnnnnnnnnnnnnnnnnnnnnnnnnnnnnnnnnnnnnnnnnnnnnnnnnnnnnnnnnnnnnnnnnnnnnnnnnnnnnnnnnnnnnnnnnnnnnnnnnnnnnnnnnnnnnnnnnnnnnnnnnnnnnnnnnnnnnnnnnnnnnnnnnnnnnnnnnnnnnnnnnnnnnnnnnnnnnnnnnnnnnnnnnnnnnnnnnnnnnnnnnnnnnnnnnnnnnnnnnnnnnnnnnnnnnnnnnnnnnnnnnnnnnnnnnnnnnnnnnnnnnnnnnnnnnnnnnnnnnnnnnnnnnnnnnnnnnnnnnnnnnnnnnnnnnnnnnnnnnnnnnnnnnnnnnnnnnnnnnnnnnnnnnnnnnnnnnnnnnnnnnnnnnnnnnnnnnnnnnnnnnnnnnnnnnnnnnnnnnnnnnnnnnnnnnnnnnnnnnnnnnnnnnnnnnnnnnnnnnnnnnnnnnnnnnnnnnnnnnnnnnnnnnnnnnnnnnnnnnnnnnnnnnnnnnnnnnnnnnnnnnnnnnnnnnnnnnnnnnnnnnnnnnnnnnnnnnnnnnnnnnnnnnnnnnnnnnnnnnnnnnnnnnnnnnnnnnnnnnnnnnnnnnnnnnnnnnnnnnnnnnnnnnnnnnnnnnnnnnnnnnnnnnnnnnnnnnnnnnnnnnnnnnnnnnnnnnnnnnnnnnnnnnnnnnnnnnnnnnnnnnnnnnnnnnnnnnnnnnnnnnnnnnnnnnnnnnnnnnnnnnnnnnnnnnnnnnnnnnnnnnnnnnnnnnnnnnnnnnnnnnnnnnnnnnnnnnnnnnnnnnnnnnnnnnnnnnnnnnnnnnnnnnnnnnnnnnnnnnnnnnnnnnnnnnnnnnnnnnnnnnnnnnnnnnnnnnnnnnnnnnnnnnnnnnnnnnnnnnnnnnnnnnnnnnnnnnnnnnnnnnnnnnnnnnnnnnnnnnnnnnnnnnnnnnnnnnnnnnnnnnnnnnnnnnnnnnnnnnnnnnnnnnnnnnnnnnnnnnnnnnnnnnnnnnnnnnnnnnnnnnnnnnnnnnnnnnnnnnnnnnnnnnnnnnnnnnnnnnnnnnnnnnnnnnnnnnnnnnnnnnnnnnnnnnnnnnnnnnnnnnnnnnnnnnnnnnnnnnnnnnnnnnnnnnnnnnnnnnnnnnnnnnnnnnnnnnnnnnnnnnnnnnnnnnnnnnnnnnnnnnnnnnnnnnnnnnnnnnnnnnnnnnnnnnnnnnnnnnnnnnnnnnnnnnnnnnnnnnnnnnnnnnnnnnnnnnnnnnnnnnnnnnnnnnnnnnnnnnnnnnnnnnnnnnnnnnnnnnnnnnnnnnnnnnnnnnnnnnnnnnnnnnnnnnnnnnnnnnnnnnnnnnnnnnnnnnnnnnnnnnnnnnnnnnnnnnnnnnnnnnnnnnnnnnnnnnnnnnnnnnnnnnnnnnnnnnnnnnnnnnnnnnnnnnnnnnnnnnnnnnnnnnnnnnnnnnnnnnnnnnnnnnnnnnnnnnnnnnnnnnnnnnnnnnnnnnnnnnnnnnnnnnnnnnnnnnnnnnnnnnnnnnnnnnnnnnnnnnnnnnnnnnnnnnnnnnnnnnnnnnnnnnnnnnnnnnnnnnnnnnnnnnnnnnnnnnnnnnnnnnnnnnnnnnnnnnnnnnnnnnnnnnnnnnnnnnnnnnnnnnnnnnnnnnnnnnnnnnnnnnnnnnnnnnnnnnnnnnnnnnnnnnnnnnnnnnnnnnnnnnnnnnnnnnnnnnnnnnnnnnnnnnnnnnnnnnnnnnnnnnnnnnnnnnnnnnnnnnnnnnnnnnnnnnnnnnnnnnnnnnnnnnnnnnnnnnnnnnnnnnnnnnnnnnnnnnnnnnnnnnnnnnnnnnnnnnnnnnnnnnnnnnnnnnnnnnnnnnnnnnnnnnnnnnnnnnnnnnnnnnnnnnnnnnnnnnnnnnnnnnnnnnnnnnnnnnnnnnnnnnnnnnnnnnnnnnnnnnnnnnnnnnnnnnnnnnnnnnnnnnnnnnnnnnnnnnnnnnnnnnnnnnnnnnnnnnnnnnnnnnnnnnnnnnnnnnnnnnnnnnnnnnnnnnnnnnnnnnnnnnnnnnnnnnnnnnnnnnnnnnnnnnnnnnnnnnnnnnnnnnnnnnnnnnnnnnnnnnnnnnnnnnnnnnnnnnnnnnnnnnnnnnnnnnnnnnnnnnnnnnnnnnnnnnnnnnnnnnnnnnnnnnnnnnnnnnnnnnnnnnnnnnnnnnnnnnnnnnnnnnnnnnnnnnnnnnnnnnnnnnnnnnnnnnnnnnnnnnnnnnnnnnnnnnnnnnnnnnnnnnnnnnnnnnnnnnnnnnnnnnnnnnnnnnnnnnnnnnnnnnnnnnnnnnnnnnnnnnnnnnnnnnnnnnnnnnnnnnnnnnnnnnnnnnnnnnnnnnnnnnnnnnnnnnnnnnnnnnnnnnnnnnnnnnnnnnnnnnnnnnnnnnnnnnnnnnnnnnnnnnnnnnnnnnnnnnnnnnnnnnnnnnnnnnnnnnnnnnnnnnnnnnnnnnnnnnnnnnnnnnnnnnnnnnnnnnnnnnnnnnnnnnnnnnnnnnnnnnnnnnnnnnnnnnnnnnnnnnnnnnnnnnnnnnnnnnnnnnnnnnnnnnnnnnnnnnnnnnnnnnnnnnnnnnnnnnnnnnnnnnnnnnnnnnnnnnnnnnnnnnnnnnnnnnnnnnnnnnnnnnnnnnnnnnnnnnnnnnnnnnnnnnnnnnnnnnnnnnnnnnnnnnnnnnnnnnnnnnnnnnnnnnnnnnnnnnnnnnnnnnnnnnnnnnnnnnnnnnnnnnnnnnnnnnnnnnnnnnnnnnnnnnnnnnnnnnnnnnnnnnnnnnnnnnnnnnnnnnnnnnnnnnnnnnnnnnnnnnnnnnnnnnnnnnnnnnnnnnnnnnnnnnnnnnnnnnnnnnnnnnnnnnnnnnnnnnnnnnnnnnnnnnnnnnnnnnnnnnnnnnnnnnnnnnnnnnnnnnnnnnnnnnnnnnnnnnnnnnnnnnnnnnnnnnnnnnnnnnnnnnnnnnnnnnnnnnnnnnnnnnnnnnnnnnnnnnnnnnnnnnnnnnnnnnnnnnnnnnnnnnnnnnnnnnnnnnnnnnnnnnnnnnnnnnnnnnnnnnnnnnnnnnnnnnnnnnnnnnnnnnnnnnnnnnnnnnnnnnnnnnnnnnnnnnnnnnnnnnnnnnnnnnnnnnnnnnnnnnnnnnnnnnnnnnnnnnnnnnnnnnnnnnnnnnnnnnnnnnnnnnnnnnnnnnnnnnnnnnnnnnnnnnnnnnnnnnnnnnnnnnnnnnnnnnnnnnnnnnnnnnnnnnnnnnnnnnnnnnnnnnnnnnnnnnnnnnnnnnnnnnnnnnnnnnnnnnnnnnnnnnnnnnnnnnnnnnnnnnnnnnnnnnnnnnnnnnnnnnnnnnnnnnnnnnnnnnnnnnnnnnnnnnnnnnnnnnnnnnnnnnnnnnnnnnnnnnnnnnnnnnnnnnnnnnnnnnnnnnnnnnnnnnnnnnnnnnnnnnnnnnnnnnnnnnnnnnnnnnnnnnnnnnnnnnnnnnnnnnnnnnnnnnnnnnnnnnnnnnnnnnnnnnnnnnnnnnnnnnnnnnnnnnnnnnnnnnnnnnnnnnnnnnnnnnnnnnnnnnnnnnnnnnnnnnnnnnnnnnnnnnnnnnnnnnnnnnnnnnnnnnnnnnnnnnnnnnnnnnnnnnnnnnnnnnnnnnnnnnnnnnnnnnnnnnnnnnnnnnnnnnnnnnnnnnnnnnnnnnnnnnnnnnnnnnnnnnnnnnnnnnnnnnnnnnnnnnnnnnnnnnnnnnnnnnnnnnnnnnnnnnnnnnnnnnnnnnnnnnnnnnnnnnnnnnnnnnnnnnnnnnnnnnnnnnnnnnnnnnnnnnnnnnnnnnnnnnnnnnnnnnnnnnnnnnnnnnnnnnnnnnnnnnnnnnnnnnnnnnnnnnnnnnnnnnnnnnnnnnnnnnnnnnnnnnnnnnnnnnnnnnnnnnnnnnnnnnnnnnnnnnnnnnnnnnnnnnnnnnnnnnnnnnnnnnnnnnnnnnnnnnnnnnnnnnnnnnnnnnnnnnnnnnnnnnnnnnnnnnnnnnnnnnnnnnnnnnnnnnnnnnnnnnnnnnnnnnnnnnnnnnnnnnnnnnnnnnnnnnnnnnnnnnnnnnnnnnnnnnnnnnnnnnnnnnnnnnnnnnnnnnnnnnnnnnnnnnnnnnnnnnnnnnnnnnnnnnnnnnnnnnnnnnnnnnnnnnnnnnnnnnnnnnnnnnnnnnnnnnnnnnnnnnnnnnnnnnnnnnnnnnnnnnnnnnnnnnnnnnnnnnnnnnnnnnnnnnnnnnnnnnnnnnnnnnnnnnnnnnnnnnnnnnnnnnnnnnnnnnnnnnnnnnnnnnnnnnnnnnnnnnnnnnnnnnnnnnnnnnnnnnnnnnnnnnnnnnnnnnnnnnnnnnnnnnnnnnnnnnnnnnnnnnnnnnnnnnnnnnnnnnnnnnnnnnnnnnnnnnnnnnnnnnnnnnnnnnnnnnnnnnnnnnnnnnnnnnnnnnnnnnnnnnnnnnnnnnnnnnnnnnnnnnnnnnnnnnnnnnnnnnnnnnnnnnnnnnnnnnnnnnnnnnnnnnnnnnnnnnnnnnnnnnnnnnnnnnnnnnnnnnnnnnnnnnnnnnnnnnnnnnnnnnnnnnnnnnnnnnnnnnnnnnnnnnnnnnnnnnnnnnnnnnnnnnnnnnnnnnnnnnnnnnnnnnnnnnnnnnnnnnnnnnnnnnnnnnnnnnnnnnnnnnnnnnnnnnnnnnnnnnnnnnnnnnnnnnnnnnnnnnnnnnnnnnnnnnnnnnnnnnnnnnnnnnnnnnnnnnnnnnnnnnnnnnnnnnnnnnnnnnnnnnnnnnnnnnnnnnnnnnnnnnnnnnnnnnnnnnnnnnnnnnnnnnnnnnnnnnnnnnnnnnnnnnnnnnnnnnnnnnnnnnnnnnnnnnnnnnnnnnnnnnnnnnnnnnnnnnnnnnnnnnnnnnnnnnnnnnnnnnnnnnnnnnnnnnnnnnnnnnnnnnnnnnnnnnnnnnnnnnnnnnnnnnnnnnnnnnnnnnnnnnnnnnnnnnnnnnnnnnnnnnnnnnnnnnnnnnnnnnnnnnnnnnnnnnnnnnnnnnnnnnnnnnnnnnnnnnnnnnnnnnnnnnnnnnnnnnnnnnnnnnnnnnnnnnnnnnnnnnnnnnnnnnnnnnnnnnnnnnnnnnnnnnnnnnnnnnnnnnnnnnnnnnnnnnnnnnnnnnnnnnnnnnnnnnnnnnnnnnnnnnnnnnnnnnnnnnnnnnnnnnnnnnnnnnnnnnnnnnnnnnnnnnnnnnnnnnnnnnnnnnnnnnnnnnnnnnnnnnnnnnnnnnnnnnnnnnnnnnnnnnnnnnnnnnnnnnnnnnnnnnnnnnnnnnnnnnnnnnnnnnnnnnnnnnnnnnnnnnnnnnnnnnnnnnnnnnnnnnnnnnnnnnnnnnnnnnnnnnnnnnnnnnnnnnnnnnnnnnnnnnnnnnnnnnnnnnnnnnnnnnnnnnnnnnnnnnnnnnnnnnnnnnnnnnnnnnnnnnnnnnnnnnnnnnnnnnnnnnnnnnnnnnnnnnnnnnnnnnnnnnnnnnnnnnnnnnnnnnnnnnnnnnnnnnnnnnnnnnnnnnnnnnnnnnnnnnnnnnnnnnnnnnnnnnnnnnnnnnnnnnnnnnnnnnnnnnnnnnnnnnnnnnnnnnnnnnnnnnnnnnnnnnnnnnnnnnnnnnnnnnnnnnnnnnnnnnnnnnnnnnnnnnnnnnnnnnnnnnnnnnnnnnnnnnnnnnnnnnnnnnnnnnnnnnnnnnnnnnnnnnnnnnnnnnnnnnnnnnnnnnnnnnnnnnnnnnnnnnnnnnnnnnnnnnnnnnnnnnnnnnnnnnnnnnnnnnnnnnnnnnnnnnnnnnnnnnnnnnnnnnnnnnnnnnnnnnnnnnnnnnnnnnnnnnnnnnnnnnnnnnnnnnnnnnnnnnnnnnnnnnnnnnnnnnnnnnnnnnnnnnnnnnnnnnnnnnnnnnnnnnnnnnnnnnnnnnnnnnnnnnnnnnnnnnnnnnnnnnnnnnnnnnnnnnnnnnnnnnnnnnnnnnnnnnnnnnnnnnnnnnnnnnnnnnnnnnnnnnnnnnnnnnnnnnnnnnnnnnnnnnnnnnnnnnnnnnnnnnnnnnnnnnnnnnnnnnnnnnnnnnnnnnnnnnnnnnnnnnnnnnnnnnnnnnnnnnnnnnnnnnnnnnnnnnnnnnnnnnnnnnnnnnnnnnnnnnnnnnnnnnnnnnnnnnnnnnnnnnnnnnnnnnnnnnnnnnnnnnnnnnnnnnnnnnnnnnnnnnnnnnnnnnnnnnnnnnnnnnnnnnnnnnnnnnnnnnnnnnnnnnnnnnnnnnnnnnnnnnnnnnnnnnnnnnnnnnnnnnnnnnnnnnnnnnnnnnnnnnnnnnnnnnnnnnnnnnnnnnnnnnnnnnnnnnnnnnnnnnnnnnnnnnnnnnnnnnnnnnnnnnnnnnnnnnnnnnnnnnnnnnnnnnnnnnnnnnnnnnnnnnnnnnnnnnnnnnnnnnnnnnnnnnnnnnnnnnnnnnnnnnnnnnnnnnnnnnnnnnnnnnnnnnnnnnnnnnnnnnnnnnnnnnnnnnnnnnnnnnnnnnnnnnnnnnnnnnnnnnnnnnnnnnnnnnnnnnnnnnnnnnnnnnnnnnnnnnnnnnnnnnnnnnnnnnnnnnnnnnnnnnnnnnnnnnnnnnnnnnnnnnnnnnnnnnnnnnnnnnnnnnnnnnnnnnnnnnnnnnnnnnnnnnnnnnnnnnnnnnnnnnnnnnnnnnnnnnnnnnnnnnnnnnnnnnnnnnnnnnnnnnnnnnnnnnnnnnnnnnnnnnnnnnnnnnnnnnnnnnnnnnnnnnnnnnnnnnnnnnnnnnnnnnnnnnnnnnnnnnnnnnnnnnnnnnnnnnnnnnnnnnnnnnnnnnnnnnnnnnnnnnnnnnnnnnnnnnnnnnnnnnnnnnnnnnnnnnnnnnnnnnnnnnnnnnnnnnnnnnnnnnnnnnnnnnnnnnnnnnnnnnnnnnnnnnnnnnnnnnnnnnnnnnnnnnnnnnnnnnnnnnnnnnnnnnnnnnnnnnnnnnnnnnnnnnnnnnnnnnnnnnnnnnnnnnnnnnnnnnnnnnnnnnnnnnnnnnnnnnnnnnnnnnnnnnnnnnnnnnnnnnnnnnnnnnnnnnnnnnnnnnnnnnnnnnnnnnnnnnnnnnnnnnnnnnnnnnnnnnnnnnnnnnnnnnnnnnnnnnnnnnnnnnnnnnnnnnnnnnnnnnnnnnnnnnnnnnnnnnnnnnnnnnnnnnnnnnnnnnnnnnnnnnnnnnnnnnnnnnnnnnnnnnnnnnnnnnnnnnnnnnnnnnnnnnnnnnnnnnnnnnnnnnnnnnnnnnnnnnnnnnnnnnnnnnnnnnnnnnnnnnnnnnnnnnnnnnnnnnnnnnnnnnnnnnnnnnnnnnnnnnnnnnnnnnnnnnnnnnnnnnnnnnnnnnnnnnnnnnnnnnnnnnnnnnnnnnnnnnnnnnnnnnnnnnnnnnnnnnnnnnnnnnnnnnnnnnnnnnnnnnnnnnnnnnnnnnnnnnnnnnnnnnnnnnnnnnnnnnnnnnnnnnnnnnnnnnnnnnnnnnnnnnnnnnnnnnnnnnnnnnnnnnnnnnnnnnnnnnnnnnnnnnnnnnnnnnnnnnnnnnnnnnnnnnnnnnnnnnnnnnnnnnnnnnnnnnnnnnnnnnnnnnnnnnnnnnnnnnnnnnnnnnnnnnnnnnnnnnnnnnnnnnnnnnnnnnnnnnnnnnnnnnnnnnnnnnnnnnnnnnnnnnnnnnnnnnnnnnnnnnnnnnnnnnnnnnnnnnnnnnnnnnnnnnnnnnnnnnnnnnnnnnnnnnnnnnnnnnnnnnnnnnnnnnnnnnnnnnnnnnnnnnnnnnnnnnnnnnnnnnnnnnnnnnnnnnnnnnnnnnnnnnnnnnnnnnnnnnnnnnnnnnnnnnnnnnnnnnnnnnnnnnnnnnnnnnnnnnnnnnnnnnnnnnnnnnnnnnnnnnnnnnnnnnnnnnnnnnnnnnnnnnnnnnnnnnnnnnnnnnnnnnnnnnnnnnnnnnnnnnnnnnnnnnnnnnnnnnnnnnnnnnnnnnnnnnnnnnnnnnnnnnnnnnnnnnnnnnnnnnnnnnnnnnnnnnnnnnnnnnnnnnnnnnnnnnnnnnnnnnnnnnnnnnnnnnnnnnnnnnnnnnnnnnnnnnnnnnnnnnnnnnnnnnnnnnnnnnnnnnnnnnnnnnnnnnnnnnnnnnnnnnnnnnnnnnnnnnnnnnnnnnnnnnnnnnnnnnnnnnnnnnnnnnnnnnnnnnnnnnnnnnnnnnnnnnnnnnnnnnnnnnnnnnnnnnnnnnnnnnnnnnnnnnnnnnnnnnnnnnnnnnnnnnnnnnnnnnnnnnnnnnnnnnnnnnnnnnnnnnnnnnnnnnnnnnnnnnnnnnnnnnnnnnnnnnnnnnnnnnnnnnnnnnnnnnnnnnnnnnnnnnnnnnnnnnnnnnnnnnnnnnnnnnnnnnnnnnnnnnnnnnnnnnnnnnnnnnnnnnnnnnnnnnnnnnnnnnnnnnnnnnnnnnnnnnnnnnnnnnnnnnnnnnnnnnnnnnnnnnnnnnnnnnnnnnnnnnnnnnnnnnnnnnnnnnnnnnnnnnnnnnnnnnnnnnnnnnnnnnnnnnnnnnnnnnnnnnnnnnnnnnnnnnnnnnnnnnnnnnnnnnnnnnnnnnnnnnnnnnnnnnnnnnnnnnnnnnnnnnnnnnnnnnnnnnnnnnnnnnnnnnnnnnnnnnnnnnnnnnnnnnnnnnnnnnnnnnnnnnnnnnnnnnnnnnnnnnnnnnnnnnnnnnnnnnnnnnnnnnnnnnnnnnnnnnnnnnnnnnnnnnnnnnnnnnnnnnnnnnnnnnnnnnnnnnnnnnnnnnnnnnnnnnnnnnnnnnnnnnnnnnnnnnnnnnnnnnnnnnnnnnnnnnnnnnnnnnnnnnnnnnnnnnnnnnnnnnnnnnnnnnnnnnnnnnnnnnnnnnnnnnnnnnnnnnnnnnnnnnnnnnnnnnnnnnnnnnnnnnnnnnnnnnnnnnnnnnnnnnnnnnnnnnnnnnnnnnnnnnnnnnnnnnnnnnnnnnnnnnnnnnnnnnnnnnnnnnnnnnnnnnnnnnnnnnnnnnnnnnnnnnnnnnnnnnnnnnnnnnnnnnnnnnnnnnnnnnnnnnnnnnnnnnnnnnnnnnnnnnnnnnnnnnnnnnnnnnnnnnnnnnnnnnnnnnnnnnnnnnnnnnnnnnnnnnnnnnnnnnnnnnnnnnnnnnnnnnnnnnnnnnnnnnnnnnnnnnnnnnnnnnnnnnnnnnnnnnnnnnnnnnnnnnnnnnnnnnnnnnnnnnnnnnnnnnnnnnnnnnnnnnnnnnnnnnnnnnnnnnnnnnnnnnnnnnnnnnnnnnnnnnnnnnnnnnnnnnnnnnnnnnnnnnnnnnnnnnnnnnnnnnnnnnnnnnnnnnnnnnnnnnnnnnnnnnnnnnnnnnnnnnnnnnnnnnnnnnnnnnnnnnnnnnnnnnnnnnnnnnnnnnnnnnnnnnnnnnnnnnnnnnnnnnnnnnnnnnnnnnnnnnnnnnnnnnnnnnnnnnnnnnnnnnnnnnnnnnnnnnnnnnnnnnnnnnnnnnnnnnnnnnnnnnnnnnnnnnnnnnnnnnnnnnnnnnnnnnnnnnnnnnnnnnnnnnnnnnnnnnnnnnnnnnnnnnnnnnnnnnnnnnnnnnnnnnnnnnnnnnnnnnnnnnnnnnnnnnnnnnnnnnnnnnnnnnnnnnnnnnnnnnnnnnnnnnnnnnnnnnnnnnnnnnnnnnnnnnnnnnnnnnnnnnnnnnnnnnnnnnnnnnnnnnnnnnnnnnnnnnnnnnnnnnnnnnnnnnnnnnnnnnnnnnnnnnnnnnnnnnnnnnnnnnnnnnnnnnnnnnnnnnnnnnnnnnnnnnnnnnnnnnnnnnnnnnnnnnnnnnnnnnnnnnnnnnnnnnnnnnnnnnnnnnnnnnnnnnnnnnnnnnnnnnnnnnnnnnnnnnnnnnnnnnnnnnnnnnnnnnnnnnnnnnnnnnnnnnnnnnnnnnnnnnnnnnnnnnnnnnnnnnnnnnnnnnnnnnnnnnnnnnnnnnnnnnnnnnnnnnnnnnnnnnnnnnnnnnnnnnnnnnnnnnnnnnnnnnnnnnnnnnnnnnnnnnnnnnnnnnnnnnnnnnnnnnnnnnnnnnnnnnnnnnnnnnnnnnnnnnnnnnnnnnnnnnnnnnnnnnnnnnnnnnnnnnnnnnnnnnnnnnnnnnnnnnnnnnnnnnnnnnnnnnnnnnnnnnnnnnnnnnnnnnnnnnnnnnnnnnnnnnnnnnnnnnnnnnnnnnnnnnnnnnnnnnnnnnnnnnnnnnnnnnnnnnnnnnnnnnnnnnnnnnnnnnnnnnnnnnnnnnnnnnnnnnnnnnnnnnnnnnnnnnnnnnnnnnnnnnnnnnnnnnnnnnnnnnnnnnnnnnnnnnnnnnnnnnnnnnnnnnnnnnnnnnnnnnnnnnnnnnnnnnnnnnnnnnnnnnnnnnnnnnnnnnnnnnnnnnnnnnnnnnnnnnnnnnnnnnnnnnnnnnnnnnnnnnnnnnnnnnnnnnnnnnnnnnnnnnnnnnnnnnnnnnnnnnnnnnnnnnnnnnnnnnnnnnnnnnnnnnnnnnnnnnnnnnnnnnnnnnnnnnnnnnnnnnnnnnnnnnnnnnnnnnnnnnnnnnnnnnnnnnnnnnnnnnnnnnnnnnnnnnnnnnnnnnnnnnnnnnnnnnnnnnnnnnnnnnnnnnnnnnnnnnnnnnnnnnnnnnnnnnnnnnnnnnnnnnnnnnnnnnnnnnnnnnnnnnnnnnnnnnnnnnnnnnnnnnnnnnnnnnnnnnnnnnnnnnnnnnnnnnnnnnnnnnnnnnnnnnnnnnnnnnnnnnnnnnnnnnnnnnnnnnnnnnnnnnnnnnnnnnnnnnnnnnnnnnnnnnnnnnnnnnnnnnnnnnnnnnnnnnnnnnnnnnnnnnnnnnnnnnnnnnnnnnnnnnnnnnnnnnnnnnnnnnnnnnnnnnnnnnnnnnnnnnnnnnnnnnnnnnnnnnnnnnnnnnnnnnnnnnnnnnnnnnnnnnnnnnnnnnnnnnnnnnnnnnnnnnnnnnnnnnnnnnnnnnnnnnnnnnnnnnnnnnnnnnnnnnnnnnnnnnnnnnnnnnnnnnnnnnnnnnnnnnnnnnnnnnnnnnnnnnnnnnnnnnnnnnnnnnnnnnnnnnnnnnnnnnnnnnnnnnnnnnnnnnnnnnnnnnnnnnnnnnnnnnnnnnnnnnnnnnnnnnnnnnnnnnnnnnnnnnnnnnnnnnnnnnnnnnnnnnnnnnnnnnnnnnnnnnnnnnnnnnnnnnnnnnnnnnnnnnnnnnnnnnnnnnnnnnnnnnnnnnnnnnnnnnnnnnnnnnnnnnnnnnnnnnnnnnnnnnnnnnnnnnnnnnnnnnnnnnnnnnnnnnnnnnnnnnnnnnnnnnnnnnnnnnnnnnnnnnnnnnnnnnnnnnnnnnnnnnnnnnnnnnnnnnnnnnnnnnnnnnnnnnnnnnnnnnnnnnnnnnnnnnnnnnnnnnnnnnnnnnnnnnnnnnnnnnnnnnnnnnnnnnnnnnnnnnnnnnnnnnnnnnnnnnnnnnnnnnnnnnnnnnnnnnnnnnnnnnnnnnnnnnnnnnnnnnnnnnnnnnnnnnnnnnnnnnnnnnnnnnnnnnnnnnnnnnnnnnnnnnnnnnnnnnnnnnnnnnnnnnnnnnnnnnnnnnnnnnnnnnnnnnnnnnnnnnnnnnnnnnnnnnnnnnnnnnnnnnnnnnnnnnnnnnnnnnnnnnnnnnnnnnnnnnnnnnnnnnnnnnnnnnnnnnnnnnnnnnnnnnnnnnnnnnnnnnnnnnnnnnnnnnnnnnnnnnnnnnnnnnnnnnnnnnnnnnnnnnnnnnnnnnnnnnnnnnnnnnnnnnnnnnnnnnnnnnnnnnnnnnnnnnnnnnnnnnnnnnnnnnnnnnnnnnnnnnnnnnnnnnnnnnnnnnnnnnnnnnnnnnnnnnnnnnnnnnnnnnnnnnnnnnnnnnnnnnnnnnnnnnnnnnnnnnnnnnnnnnnnnnnnnnnnnnnnnnnnnnnnnnnnnnnnnnnnnnnnnnnnnnnnnnnnnnnnnnnnnnnnnnnnnnnnnnnnnnnnnnnnnnnnnnnnnnnnnnnnnnnnnnnnnnnnnnnnnnnnnnnnnnnnnnnnnnnnnnnnnnnnnnnnnnnnnnnnnnnnnnnnnnnnnnnnnnnnnnnnnnnnnnnnnnnnnnnnnnnnnnnnnnnnnnnnnnnnnnnnnnnnnnnnnnnnnnnnnnnnnnnnnnnnnnnnnnnnnnnnnnnnnnnnnnnnnnnnnnnnnnnnnnnnnnnnnnnnnnnnnnnnnnnnnnnnnnnnnnnnnnnnnnnnnnnnnnnnnnnnnnnnnnnnnnnnnnnnnnnnnnnnnnnnnnnnnnnnnnnnnnnnnnnnnnnnnnnnnnnnnnnnnnnnnnnnnnnnnnnnnnnnnnnnnnnnnnnnnnnnnnnnnnnnnnnnnnnnnnnnnnnnnnnnnnnnnnnnnnnnnnnnnnnnnnnnnnnnnnnnnnnnnnnnnnnnnnnnnnnnnnnnnnnnnnnnnnnnnnnnnnnnnnnnnnnnnnnnnnnnnnnnnnnnnnnnnnnnnnnnnnnnnnnnnnnnnnnnnnnnnnnnnnnnnnnnnnnnnnnnnnnnnnnnnnnnnnnnnnnnnnnnnnnnnnnnnnnnnnnnnnnnnnnnnnnnnnnnnnnnnnnnnnnnnnnnnnnnnnnnnnnnnnnnnnnnnnnnnnnnnnnnnnnnnnnnnnnnnnnnnnnnnnnnnnnnnnnnnnnnnnnnnnnnnnnnnnnnnnnnnnnnnnnnnnnnnnnnnnnnnnnnnnnnnnnnnnnnnnnnnnnnnnnnnnnnnnnnnnnnnnnnnnnnnnnnnnnnnnnnnnnnnnnnnnnnnnnnnnnnnnnnnnnnnnnnnnnnnnnnnnnnnnnnnnnnnnnnnnnnnnnnnnnnnnnnnnnnnnnnnnnnnnnnnnnnnnnnnnnnnnnnnnnnnnnnnnnnnnnnnnnnnnnnnnnnnnnnnnnnnnnnnnnnnnnnnnnnnnnnnnnnnnnnnnnnnnnnnnnnnnnnnnnnnnnnnnnnnnnnnnnnnnnnnnnnnnnnnnnnnnnnnnnnnnnnnnnnnnnnnnnnnnnnnnnnnnnnnnnnnnnnnnnnnnnnnnnnnnnnnnnnnnnnnnnnnnnnnnnnnnnnnnnnnnnnnnnnnnnnnnnnnnnnnnnnnnnnnnnnnnnnnnnnnnnnnnnnnnnnnnnnnnnnnnnnnnnnnnnnnnnnnnnnnnnnnnnnnnnnnnnnnnnnnnnnnnnnnnnnnnnnnnnnnnnnnnnnnnnnnnnnnnnnnnnnnnnnnnnnnnnnnnnnnnnnnnnnnnnnnnnnnnnnnnnnnnnnnnnnnnnnnnnnnnnnnnnnnnnnnnnnnnnnnnnnnnnnnnnnnnnnnnnnnnnnnnnnnnnnnnnnnnnnnnnnnnnnnnnnnnnnnnnnnnnnnnnnnnnnnnnnnnnnnnnnnnnnnnnnnnnnnnnnnnnnnnnnnnnnnnnnnnnnnnnnnnnnnnnnnnnnnnnnnnnnnnnnnnnnnnnnnnnnnnnnnnnnnnnnnnnnnnnnnnnnnnnnnnnnnnnnnnnnnnnnnnnnnnnnnnnnnnnnnnnnnnnnnnnnnnnnnnnnnnnnnnnnnnnnnnnnnnnnnnnnnnnnnnnnnnnnnnnnnnnnnnnnnnnnnnnnnnnnnnnnnnnnnnnnnnnnnnnnnnnnnnnnnnnnnnnnnnnnnnnnnnnnnnnnnnnnnnnnnnnnnnnnnnnnnnnnnnnnnnnnnnnnnnnnnnnnnnnnnnnnnnnnnnnnnnnnnnnnnnnnnnnnnnnnnnnnnnnnnnnnnnnnnnnnnnnnnnnnnnnnnnnnnnnnnnnnnnnnnnnnnnnnnnnnnnnnnnnnnnnnnnnnnnnnnnnnnnnnnnnnnnnnnnnnnnnnnnnnnnnnnnnnnnnnnnnnnnnnnnnnnnnnnnnnnnnnnnnnnnnnnnnnnnnnnnnnnnnnnnnnnnnnnnnnnnnnnnnnnnnnnnnnnnnnnnnnnnnnnnnnnnnnnnnnnnnnnnnnnnnnnnnnnnnnnnnnnnnnnnnnnnnnnnnnnnnnnnnnnnnnnnnnnnnnnnnnnnnnnnnnnnnnnnnnnnnnnnnnnnnnnnnnnnnnnnnnnnnnnnnnnnnnnnnnnnnnnnnnnnnnnnnnnnnnnnnnnnnnnnnnnnnnnnnnnnnnnnnnnnnnnnnnnnnnnnnnnnnnnnnnnnnnnnnnnnnnnnnnnnnnnnnnnnnnnnnnnnnnnnnnnnnnnnnnnnnnnnnnnnnnnnnnnnnnnnnnnnnnnnnnnnnnnnnnnnnnnnnnnnnnnnnnnnnnnnnnnnnnnnnnnnnnnnnnnnnnnnnnnnnnnnnnnnnnnnnnnnnnnnnnnnnnnnnnnnnnnnnnnnnnnnnnnnnnnnnnnnnnnnnnnnnnnnnnnnnnnnnnnnnnnnnnnnnnnnnnnnnnnnnnnnnnnnnnnnnnnnnnnnnnnnnnnnnnnnnnnnnnnnnnnnnnnnnnnnnnnnnnnnnnnnnnnnnnnnnnnnnnnnnnnnnnnnnnnnnnnnnnnnnnnnnnnnnnnnnnnnnnnnnnnnnnnnnnnnnnnnnnnnnnnnnnnnnnnnnnnnnnnnnnnnnnnnnnnnnnnnnnnnnnnnnnnnnnnnnnnnnnnnnnnnnnnnnnnnnnnnnnnnnnnnnnnnnnnnnnnnnnnnnnnnnnnnnnnnnnnnnnnnnnnnnnnnnnnnnnnnnnnnnnnnnnnnnnnnnnnnnnnnnnnnnnnnnnnnnnnnnnnnnnnnnnnnnnnnnnnnnnnnnnnnnnnnnnnnnnnnnnnnnnnnnnnnnnnnnnnnnnnnnnnnnnnnnnnnnnnnnnnnnnnnnnnnnnnnnnnnnnnnnnnnnnnnnnnnnnnnnnnnnnnnnnnnnnnnnnnnnnnnnnnnnnnnnnnnnnnnnnnnnnnnnnnnnnnnnnnnnnnnnnnnnnnnnnnnnnnnnnnnnnnnnnnnnnnnnnnnnnnnnnnnnnnnnnnnnnnnnnnnnnnnnnnnnnnnnnnnnnnnnnnnnnnnnnnnnnnnnnnnnnnnnnnnnnnnnnnnnnnnnnnnnnnnnnnnnnnnnnnnnnnnnnnnnnnnnnnnnnnnnnnnnnnnnnnnnnnnnnnnnnnnnnnnnnnnnnnnnnnnnnnnnnnnnnnnnnnnnnnnnnnnnnnnnnnnnnnnnnnnnnnnnnnnnnnnnnnnnnnnnnnnnnnnnnnnnnnnnnnnnnnnnnnnnnnnnnnnnnnnnnnnnnnnnnnnnnnnnnnnnnnnnnnnnnnnnnnnnnnnnnnnnnnnnnnnnnnnnnnnnnnnnnnnnnnnnnnnnnnnnnnnnnnnnnnnnnnnnnnnnnnnnnnnnnnnnnnnnnnnnnnnnnnnnnnnnnnnnnnnnnnnnnnnnnnnnnnnnnnnnnnnnnnnnnnnnnnnnnnnnnnnnnnnnnnnnnnnnnnnnnnnnnnnnnnnnnnnnnnnnnnnnnnnnnnnnnnnnnnnnnnnnnnnnnnnnnnnnnnnnnnnnnnnnnnnnnnnnnnnnnnnnnnnnnnnnnnnnnnnnnnnnnnnnnnnnnnnnnnnnnnnnnnnnnnnnnnnnnnnnnnnnnnnnnnnnnnnnnnnnnnnnnnnnnnnnnnnnnnnnnnnnnnnnnnnnnnnnnnnnnnnnnnnnnnnnnnnnnnnnnnnnnnnnnnnnnnnnnnnnnnnnnnnnnnnnnnnnnnnnnnnnnnnnnnnnnnnnnnnnnnnnnnnnnnnnnnnnnnnnnnnnnnnnnnnnnnnnnnnnnnnnnnnnnnnnnnnnnnnnnnnnnnnnnnnnnnnnnnnnnnnnnnnnnnnnnnnnnnnnnnnnnnnnnnnnnnnnnnnnnnnnnnnnnnnnnnnnnnnnnnnnnnnnnnnnnnnnnnnnnnnnnnnnnnnnnnnnnnnnnnnnnnnnnnnnnnnnnnnnnnnnnnnnnnnnnnnnnnnnnnnnnnnnnnnnnnnnnnnnnnnnnnnnnnnnnnnnnnnnnnnnnnnnnnnnnnnnnnnnnnnnnnnnnnnnnnnnnnnnnnnnnnnnnnnnnnnnnnnnnnnnnnnnnnnnnnnnnnnnnnnnnnnnnnnnnnnnnnnnnnnnnnnnnnnnnnnnnnnnnnnnnnnnnnnnnnnnnnnnnnnnnnnnnnnnnnnnnnnnnnnnnnnnnnnnnnnnnnnnnnnnnnnnnnnnnnnnnnnnnnnnnnnnnnnnnnnnnnnnnnnnnnnnnnnnnnnnnnnnnnnnnnnnnnnnnnnnnnnnnnnnnnnnnnnnnnnnnnnnnnnnnnnnnnnnnnnnnnnnnnnnnnnnnnnnnnnnnnnnnnnnnnnnnnnnnnnnnnnnnnnnnnnnnnnnnnnnnnnnnnnnnnnnnnnnnnnnnnnnnnnnnnnnnnnnnnnnnnnnnnnnnnnnnnnnnnnnnnnnnnnnnnnnnnnnnnnnnnnnnnnnnnnnnnnnnnnnnnnnnnnnnnnnnnnnnnnnnnnnnnnnnnnnnnnnnnnnnnnnnnnnnnnnnnnnnnnnnnnnnnnnnnnnnnnnnnnnnnnnnnnnnnnnnnnnnnnnnnnnnnnnnnnnnnnnnnnnnnnnnnnnnnnnnnnnnnnnnnnnnnnnnnnnnnnnnnnnnnnnnnnnnnnnnnnnnnnnnnnnnnnnnnnnnnnnnnnnnnnnnnnnnnnnnnnnnnnnnnnnnnnnnnnnnnnnnnnnnnnnnnnnnnnnnnnnnnnnnnnnnnnnnnnnnnnnnnnnnnnnnnnnnnnnnnnnnnnnnnnnnnnnnnnnnnnnnnnnnnnnnnnnnnnnnnnnnnnnnnnnnnnnnnnnnnnnnnnnnnnnnnnnnnnnnnnnnnnnnnnnnnnnnnnnnnnnnnnnnnnnnnnnnnnnnnnnnnnnnnnnnnnnnnnnnnnnnnnnnnnnnnnnnnnnnnnnnnnnnnnnnnnnnnnnnnnnnnnnnnnnnnnnnnnnnnnnnnnnnnnnnnnnnnnnnnnnnnnnnnnnnnnnnnnnnnnnnnnnnnnnnnnnnnnnnnnnnnnnnnnnnnnnnnnnnnnnnnnnnnnnnnnnnnnnnnnnnnnnnnnnnnnnnnnnnnnnnnnnnnnnnnnnnnnnnnnnnnnnnnnnnnnnnnnnnnnnnnnnnnnnnnnnnnnnnnnnnnnnnnnnnnnnnnnnnnnnnnnnnnnnnnnnnnnnnnnnnnnnnnnnnnnnnnnnnnnnnnnnnnnnnnnnnnnnnnnnnnnnnnnnnnnnnnnnnnnnnnnnnnnnnnnnnnnnnnnnnnnnnnnnnnnnnnnnnnnnnnnnnnnnnnnnnnnnnnnnnnnnnnnnnnnnnnnnnnnnnnnnnnnnnnnnnnnnnnnnnnnnnnnnnnnnnnnnnnnnnnnnnnnnnnnnnnnnnnnnnnnnnnnnnnnnnnnnnnnnnnnnnnnnnnnnnnnnnnnnnnnnnnnnnnnnnnnnnnnnnnnnnnnnnnnnnnnnnnnnnnnnnnnnnnnnnnnnnnnnnnnnnnnnaggggggcgctgccctggatgatgtgcccgccggcagcgagtactgaactactacacgttatttgtgtgacaacagtatgtcaaaacaggatggcgggcaaccgagtgtagcatcacacaggaaatgaccgctattaccgaattaggaaaactgcgacgaggaaagcgacactgcctgtagctggcaggttacggattgcgagcagagcatatcagatgatgattccggatagaacaccatgatttatgagatattggcaaatatggatttacgatcattatgaaattttataagccgccgttgtcgtaaccgtgattgtcccgttacggagatactgtccagccgtcttccaaagccgtggaagaaggactttattcggacaagacatggggaatgattgacaaccctgcggttaagatatactatatcgattgatgccaatattgatgacaattgcctaacggcgaattgatatgggcaatccaggtatagcggagcatcagggaggcaggtcaagttgctatcgcgaaagcgaaatgaaccggtcaatttggtagatagttggaaatgaggattggaggtgaatacttttgagctacaacctgcttgaggaagaatggattccagttctttatactgacggcaaattcacgcatgtgggaatcaaaggggcatttagggaagccaatcgcattaggcagatcgcggcgagcaatccgatggattgcgtggctatcttccggttcatgctcgcgttactttattggtgccaagggaatccgccagtagccacagatattgcctcagaaagattattccctcttgatcggttcaccaaactcgatgccaacagagagtgtttcaatttactcggtggtggcacgcggttttatcagtaccggcaagcgggggacaaagagctcacagtaaattatcttttacatgagatacctactggcactaatttctggcatttccggcactctaccgataataaagacggcctatgtcgggcatgctgtgcattaggtctggtacggttgccagtattctccactcagggtgggcgtggcaatccgccaggcatcaatgccaagccgcccatgtatgtggttccaatcggcaatactcttgcagacgcactgctactgtcctggtggccagtgagtggcttggggtcacctgcatgggagaaacccgatctacctctgcctaaagcgggccaggtaccgttgctaacaggattgacctggctgccgaggcgggtgtggttaggtgaaccacaggaaactgttgctcgctgcatttcctgcggtcgccaggaccaccttatactgtccagcgtctttgccggcaaaggtagtactaagaccggggataatactccccagcgcatctggcatgacccacacgtaatatacgtgcaaagtaggatgggggagatttcattgcacgctaatgactccgtgagcaaggtagatgttagtgcaggtcagtgggccggaacaatggcagaattgctgcggaatccccaaaatggtcaggtcaaggcttgggttgtcggcttttcaactgatcaagccaaatgcagggaggtttctgaatcatttttcccctgggcgggttcgcccgaacaggtagaactatgtatagagatgctaaatcagtggcagcaattaaatttaaatattagcaacgaactcaagggattagacggcagaatattttcagcgaaacgtcctgagattaaggcaatgatggccactgttcgaccccacattgagagtcgcgtttcgcagcaggcagctcattttcttactggtggagacagtgcctggcagcaggccaaagaggagtacagccaaatgatgaaggtggtggctggagccctatccccgggtgttacaacagaggcagtcggtcggcggcgaaaaatggcacggttgctaccggagatggttcggcaaacagcaaaaccgggggaacctgtgagggtaaagcgaggaagcaaatgagtcccacagctactgagcaatatattggaatcctaacaaggctaaagcccggcgatcttggcttgttgcgtacgcacgctgggcaaggcctgaacgagacggtacagggctttgacctattcactggactgtggtggcctttgcagaaaaagagccagtttgcaccacgccgggaggtggcctggctcgtcgccaagctttatgccttttcaccgatcccgcaatcgaccggtgatacgcttgcccgccgactggcgcactacttgccaaatgaaaagcgagaaaaaaaacggtttcaaaagaaatttgatgagttgcttttattacagctgggcaaggtagaacttgaattgcggtgggccttatcggtcatagcttaccacgacaaaactcttgactgggtaaggctgaccgacgacctgtccgcctgggaacgcgaagcgacccgcctcaaatgggcggagcaatttctaaattattaaaggaggaaccatgcttattgaaattcacatgatccagaaccatagtgcggccaatctgaaccgggatgacctgggagcacccaagagctgctactttggaggagttctccgctcacgcatttccagtcagtgcctcaagcggagcatacgcatgagcgatgagttcaaagagatactcggcggcgtccgcacaagacaattggcgaaattgatagcggacgaagtcaagggcggaccaaaagagagggaactcgctgagacaatcctctcagattgcgggttcaagacagagaaagacaagagcaagatgcttatctataccacacgtgatgctatcaaggaaatggccagtctcctacagagaaagagcgggaaaggcaaggacgaacttgcaagggaattctccaagataatcgctgaacgcgttcttgctcccgatatggccttgtgtgggcgtatgctggagccaagtgagtctgtacaaggggtatgggatgacctgggcactaccgttgaagctgcattacaggtagcgcacgccatctctactcacgaggcccgccccgaagtggattattacgttgccgcagacgatatccccggagccgatgcgggcgccggcttcgttggtgaagctatgttcgcctcggcctgcttctacaagtacttctctattcaatgggaaacactggtcaagaacctaaatggggatactaacttagcagcccatactgtcggcactttcattcgcggggcagccctggtgaatccaacgggcaagcagaatagcttcgccgcgcataattatccggatggcatcttagtggaaatcagaaaaacacctatcagctacgccaacgcctttgcgaaaccggttgctcagggcgaacgggacataatctcgcagagtattgcgcagttgggccaatatgtgcacgacctggacaccggttttggcaagccgcaacaacgcttttggttctctcctaatctacgataccccttaacagtaattgagaataagcaggaagtatcccttggtgacagccccaccaaatcaatggatgtgcttatacaggatgtgatcaaagcaattggttttgactgggaaaaggttaagaaagcggtcataaattcatcggtgaatccatgaatgccaataccctgtttctgaggcttgatggccctcttcaagcatggggcgaccatgaatccaagttcgttgtccgtcgtacggcggaagcgcctacaaaatctggagtaagcggaatgctctgcgcagcgctcggtgtctcaagagcccaagcatcctcggagtggctgcccaaattaaatactataaggatgggcgttcgggttgatcaacccggtgtccgttggtgggactatcacaccgtaggtgcaggcatggagatgcgtacagccggtaaaaggaaagctgtaaaggaggcggggacatccgtggccatgctcacaaggcgggagtacctatgtgatgcttcttttcttgtggcgctacagggagagccaaatctcatcgccacattagaggcagccatagagaacccaagatggacgatatgcctggggcgtaaatgctgtcccccctcgcgcccattgcttgaacacacggcagattatttccctgacctgctcacagcactaaagtctgtaccgtggcggcggagacttcagacggatcctgcacctcagacggttggttgtcttcttgaatggcagccgacagcaggacaggcggaagtgccctttgacactctggtctggtatgacagccctctaacttttgagccaccttcttgtgcccctcgccttgttatccgccgcgaactacaaatcgggactgatgtcagtattgcagaaaagccagcgcagaacgaaacacccagaccactccgcccgcgagcggactatacaaacactcaatatcggagggctcgcgcggagcgattggaagcagacttcggtctttgtgttttttgcaaagcgcccgctaatactgtacagcatattacgtaccgccgtgccggtggagaagagacgcaggatgacctccgctcgctatgtcggctttgccacgatgctgtgactatggtggagtacggtttgggtatgggacttgatcgtattaaccctgaagattcacagtggcgggatctgataagcactaatcgccagaagattatcaagtttcgctcattggagacccgtcgccggaggctcagtccggaggaggttgaatagatatgtatttatcctacctgcttattaacgtgggagataacccggacctaccgcggcccggcaggctgtggctgcgcaatatgtaccgtgttcatcagcggttgtgcatggcattcccgtcttctgaacgcaaagaaaatgaccctgacttcgtaaagtgttttcgtcccgatgattttcagcatgttcatggacagcgtacggctgaccaggcgtttctttttcggctcgaccccaggacaaacggcaatcccgtaatcatcgttcaatctgcgttgaaaccagattgggaatatgcttttcacaatgccacgtaccttctggctgcacccccacagatgaagccatatgatccgcaatttcgggatggacagattctcaacttccgcctgatggctaacgccacgcgaaagaaagataaggaaaatcgccctgaggggaaaaacaacttcggcaggagggtgcctgtgcctgcgaatgagcttgaggcatggcttacctcccgcgcaatgcgatgtggcttcgaggtggagaaactcaccaacgtgcatacgggatatgtggaggctttcaaagataagggtgatcgtaacggtgccgatattaaagcggatggggagaaagatgggcggcttaagcgcttattctatgcccgctttgaaggcaaactccaggtaattgctcctgaatctattcgtgattccgtaatgcgaggcgtcggtgccggtaaagctttcggcctcggattgttaactatcgctatggggagtgactgaccatccgtacgctatatgaattgccgcgcttccaggaccgctggagttatctttatctggagatgggacgaatagacgttgactctgatggattgaattttcatcagggcgaatcagtgacaagagttccaattgatcaattgagtgtggtcatgcttggcccaggtaccaccatcacccatgccgcagtaaaatcattatccgcaaataattgccttttagcctggactggacaggacggtatacggctctattccgcaagcataggtggcacttacagtgcgcggcggctgatacggcaggcaagactggcttccgatgagataaaaagaatggaagtggcctggcgcatgtatcgattccgcttcaatgaatctatacaacctgtggtcagccttgaaagtatccgcggcatggagggtatccgcgtgcggcgcatttattctgcggcatcaactcaatatggtgttgaatggaaagggcgccgttatgaccagactgactggagcaaggcagacccgatcaaccgcgcactttctactgcaaatgcctgcctttatggaatctgtcacgccggtatactatcagccggttattcaccggcactaggattcatccatactggcaagatgttaagctttgtttacgatatggccgatttatacaaaaccgagattacaatcccgttagcttttaagatggtttctcaaaagccgcctgacctggaacgggccattcgcatggaatgccgtaccgctttttatgaacacaagattatggaaagaataataccggatattgcggaggtgttaggtgttagtgatgatattggagaaagtgccgatgagcttgaagggcgcattgtcacgctggcttctggaaccgaaaacagggatattccttggtaatccaagcgccaggattagggatgaactctggaaccgatctataaaaaaattggggggaacgggtacagtaatgcaggtttggacagagcataacccgcaggggttttcttatcgtcaatctggtgagagggagcgtaaatttgtggattatgaagggattgctttaatgcaatcacacaaagctgttgacactaagacaacttagttaaatatggaaccattttcgattagctacagttttccagagagttccccacgcatgtgggggtgaaccgtataagtacgatggcaaacctatcccgggcgtgagttccccacgcatgtgggggtgaaccgtatggccgttacctgtgctttaggtgttgcatgagttccccacgcatgtgggggtgaaccggtggactgcaagagtacccctgaacacgacccgagttccccacgcatgtgggggtgaaccgcaggccgctaagaaacgccagcttgcgctcttgagttccccacgcatgtgggggtgaaccgtcctgggggtttaaggttttgcaccggatatcgagttccccacgcatgtgggggtgaaccggaaagctctcaaatggccggtcttaaccggggcgagttccccacgcatgtgggggtgaaccgggtgaacggggccaatagcggggccatgtatgtcgagttccccacgcatgtgggggtgaaccgtcgttgtcctccaacgtgccgtcaacggtgaggagttccccacgcatgtgggggtgaaccgaaccctctggagtgtcaccgttcatatgttggagttccccacgcatgtgggggtgaaccgtaagtcgctgtacttttcctctgtgatttcaagagttccccacgcatgtgggggtgaaccgataaactggatgatccctgcccggaatgtggggagttccccacgcatgtgggggtgaaccgaccggcacgggcaacatcatcaatccgtccgggagttccccacgcatgtgggggtgaaccgcaattcaagtgcaaagaatgtggagagaaggtgagttccccacgcatgtgggggtgaaccggttagcgtaaatatgataggcagcaattcagcgagttccccacgcatgtgggggtgaaccgatgctggagactatgtcaagggtttgaccatggagttccccacgcatgtgggggtgaaccggatcgtctatcaccctggacagtggctcctccgagttccccacgcatgtgggggtgaaccgggcggcgtcaatcttcatattgattatatcgacgagttccccacgcatgtgggggtgaaccgacagagatagcaacacttaccctgcggcaaccgagttccccacgcatgtgggggtgaaccgtttccgatcgattgagtccccgtacgtcgcaagagttccccacgcatgtgggggtgaaccgacaacacgccagccagacacattaaccataacgagttccccacgcatgtgggggtgaaccgaggttatcatcaccattgggacacgatccatcgagttccccacgcatgtgggggtgaaccgcggcggacccgagaatggttaagatatcgcctgagttccccacgcatgtgggggtgaaccgtcagccggtacatggaattccttcttactgaagagttccccacgcatgtgggggtgaaccgcaggctttagtcatgccgcttttaagttgcgcgagttccccacgcatgtgggggtgaaccggaaactgctattgagcggcttgcttacggcctgagttccccacgcatgtgggggtgaaccgcataggggtgaaatatgaaaggatatccgaaagagttccccacgcatgtgggggtgaaccggaaaaatccctcatcttcaaggccgacataatgagttccccacgcatgtgggggtgaaccggaggcagggttatgacactaccaacattatgtgagttccccacgcatgtgggggtgaaccgtaacaacgatatcagcgatatatatagtataggagttccccacgcatgtgggggtgaaccggcgtgatagttagcctttacttcttctaacccgagttccccacgcatgtgggggtgaaccgaatg

SEQ ID NO: 1077 - DNA, 105115 bp, Artificial Sequence
  Synthetic Oligonucleotide
  misc_feature (1)..(96573): n is a, c, g, or t
nnnnnnnnnnnnnnnnnnnnnnnnnnnnnnnnnnnnnnnnnnnnnnnnnnnnnnnnnnnnnnnnnnnnnnnnnnnnnnnnnnnnnnnnnnnnnnnnnnnnnnnnnnnnnnnnnnnnnnnnnnnnnnnnnnnnnnnnnnnnnnnnnnnnnnnnnnnnnnnnnnnnnnnnnnnnnnnnnnnnnnnnnnnnnnnnnnnnnnnnnnnnnnnnnnnnnnnnnnnnnnnnnnnnnnnnnnnnnnnnnnnnnnnnnnnnnnnnnnnnnnnnnnnnnnnnnnnnnnnnnnnnnnnnnnnnnnnnnnnnnnnnnnnnnnnnnnnnnnnnnnnnnnnnnnnnnnnnnnnnnnnnnnnnnnnnnnnnnnnnnnnnnnnnnnnnnnnnnnnnnnnnnnnnnnnnnnnnnnnnnnnnnnnnnnnnnnnnnnnnnnnnnnnnnnnnnnnnnnnnnnnnnnnnnnnnnnnnnnnnnnnnnnnnnnnnnnnnnnnnnnnnnnnnnnnnnnnnnnnnnnnnnnnnnnnnnnnnnnnnnnnnnnnnnnnnnnnnnnnnnnnnnnnnnnnnnnnnnnnnnnnnnnnnnnnnnnnnnnnnnnnnnnnnnnnnnnnnnnnnnnnnnnnnnnnnnnnnnnnnnnnnnnnnnnnnnnnnnnnnnnnnnnnnnnnnnnnnnnnnnnnnnnnnnnnnnnnnnnnnnnnnnnnnnnnnnnnnnnnnnnnnnnnnnnnnnnnnnnnnnnnnnnnnnnnnnnnnnnnnnnnnnnnnnnnnnnnnnnnnnnnnnnnnnnnnnnnnnnnnnnnnnnnnnnnnnnnnnnnnnnnnnnnnnnnnnnnnnnnnnnnnnnnnnnnnnnnnnnnnnnnnnnnnnnnnnnnnnnnnnnnnnnnnnnnnnnnnnnnnnnnnnnnnnnnnnnnnnnnnnnnnnnnnnnnnnnnnnnnnnnnnnnnnnnnnnnnnnnnnnnnnnnnnnnnnnnnnnnnnnnnnnnnnnnnnnnnnnnnnnnnnnnnnnnnnnnnnnnnnnnnnnnnnnnnnnnnnnnnnnnnnnnnnnnnnnnnnnnnnnnnnnnnnnnnnnnnnnnnnnnnnnnnnnnnnnnnnnnnnnnnnnnnnnnnnnnnnnnnnnnnnnnnnnnnnnnnnnnnnnnnnnnnnnnnnnnnnnnnnnnnnnnnnnnnnnnnnnnnnnnnnnnnnnnnnnnnnnnnnnnnnnnnnnnnnnnnnnnnnnnnnnnnnnnnnnnnnnnnnnnnnnnnnnnnnnnnnnnnnnnnnnnnnnnnnnnnnnnnnnnnnnnnnnnnnnnnnnnnnnnnnnnnnnnnnnnnnnnnnnnnnnnnnnnnnnnnnnnnnnnnnnnnnnnnnnnnnnnnnnnnnnnnnnnnnnnnnnnnnnnnnnnnnnnnnnnnnnnnnnnnnnnnnnnnnnnnnnnnnnnnnnnnnnnnnnnnnnnnnnnnnnnnnnnnnnnnnnnnnnnnnnnnnnnnnnnnnnnnnnnnnnnnnnnnnnnnnnnnnnnnnnnnnnnnnnnnnnnnnnnnnnnnnnnnnnnnnnnnnnnnnnnnnnnnnnnnnnnnnnnnnnnnnnnnnnnnnnnnnnnnnnnnnnnnnnnnnnnnnnnnnnnnnnnnnnnnnnnnnnnnnnnnnnnnnnnnnnnnnnnnnnnnnnnnnnnnnnnnnnnnnnnnnnnnnnnnnnnnnnnnnnnnnnnnnnnnnnnnnnnnnnnnnnnnnnnnnnnnnnnnnnnnnnnnnnnnnnnnnnnnnnnnnnnnnnnnnnnnnnnnnnnnnnnnnnnnnnnnnnnnnnnnnnnnnnnnnnnnnnnnnnnnnnnnnnnnnnnnnnnnnnnnnnnnnnnnnnnnnnnnnnnnnnnnnnnnnnnnnnnnnnnnnnnnnnnnnnnnnnnnnnnnnnnnnnnnnnnnnnnnnnnnnnnnnnnnnnnnnnnnnnnnnnnnnnnnnnnnnnnnnnnnnnnnnnnnnnnnnnnnnnnnnnnnnnnnnnnnnnnnnnnnnnnnnnnnnnnnnnnnnnnnnnnnnnnnnnnnnnnnnnnnnnnnnnnnnnnnnnnnnnnnnnnnnnnnnnnnnnnnnnnnnnnnnnnnnnnnnnnnnnnnnnnnnnnnnnnnnnnnnnnnnnnnnnnnnnnnnnnnnnnnnnnnnnnnnnnnnnnnnnnnnnnnnnnnnnnnnnnnnnnnnnnnnnnnnnnnnnnnnnnnnnnnnnnnnnnnnnnnnnnnnnnnnnnnnnnnnnnnnnnnnnnnnnnnnnnnnnnnnnnnnnnnnnnnnnnnnnnnnnnnnnnnnnnnnnnnnnnnnnnnnnnnnnnnnnnnnnnnnnnnnnnnnnnnnnnnnnnnnnnnnnnnnnnnnnnnnnnnnnnnnnnnnnnnnnnnnnnnnnnnnnnnnnnnnnnnnnnnnnnnnnnnnnnnnnnnnnnnnnnnnnnnnnnnnnnnnnnnnnnnnnnnnnnnnnnnnnnnnnnnnnnnnnnnnnnnnnnnnnnnnnnnnnnnnnnnnnnnnnnnnnnnnnnnnnnnnnnnnnnnnnnnnnnnnnnnnnnnnnnnnnnnnnnnnnnnnnnnnnnnnnnnnnnnnnnnnnnnnnnnnnnnnnnnnnnnnnnnnnnnnnnnnnnnnnnnnnnnnnnnnnnnnnnnnnnnnnnnnnnnnnnnnnnnnnnnnnnnnnnnnnnnnnnnnnnnnnnnnnnnnnnnnnnnnnnnnnnnnnnnnnnnnnnnnnnnnnnnnnnnnnnnnnnnnnnnnnnnnnnnnnnnnnnnnnnnnnnnnnnnnnnnnnnnnnnnnnnnnnnnnnnnnnnnnnnnnnnnnnnnnnnnnnnnnnnnnnnnnnnnnnnnnnnnnnnnnnnnnnnnnnnnnnnnnnnnnnnnnnnnnnnnnnnnnnnnnnnnnnnnnnnnnnnnnnnnnnnnnnnnnnnnnnnnnnnnnnnnnnnnnnnnnnnnnnnnnnnnnnnnnnnnnnnnnnnnnnnnnnnnnnnnnnnnnnnnnnnnnnnnnnnnnnnnnnnnnnnnnnnnnnnnnnnnnnnnnnnnnnnnnnnnnnnnnnnnnnnnnnnnnnnnnnnnnnnnnnnnnnnnnnnnnnnnnnnnnnnnnnnnnnnnnnnnnnnnnnnnnnnnnnnnnnnnnnnnnnnnnnnnnnnnnnnnnnnnnnnnnnnnnnnnnnnnnnnnnnnnnnnnnnnnnnnnnnnnnnnnnnnnnnnnnnnnnnnnnnnnnnnnnnnnnnnnnnnnnnnnnnnnnnnnnnnnnnnnnnnnnnnnnnnnnnnnnnnnnnnnnnnnnnnnnnnnnnnnnnnnnnnnnnnnnnnnnnnnnnnnnnnnnnnnnnnnnnnnnnnnnnnnnnnnnnnnnnnnnnnnnnnnnnnnnnnnnnnnnnnnnnnnnnnnnnnnnnnnnnnnnnnnnnnnnnnnnnnnnnnnnnnnnnnnnnnnnnnnnnnnnnnnnnnnnnnnnnnnnnnnnnnnnnnnnnnnnnnnnnnnnnnnnnnnnnnnnnnnnnnnnnnnnnnnnnnnnnnnnnnnnnnnnnnnnnnnnnnnnnnnnnnnnnnnnnnnnnnnnnnnnnnnnnnnnnnnnnnnnnnnnnnnnnnnnnnnnnnnnnnnnnnnnnnnnnnnnnnnnnnnnnnnnnnnnnnnnnnnnnnnnnnnnnnnnnnnnnnnnnnnnnnnnnnnnnnnnnnnnnnnnnnnnnnnnnnnnnnnnnnnnnnnnnnnnnnnnnnnnnnnnnnnnnnnnnnnnnnnnnnnnnnnnnnnnnnnnnnnnnnnnnnnnnnnnnnnnnnnnnnnnnnnnnnnnnnnnnnnnnnnnnnnnnnnnnnnnnnnnnnnnnnnnnnnnnnnnnnnnnnnnnnnnnnnnnnnnnnnnnnnnnnnnnnnnnnnnnnnnnnnnnnnnnnnnnnnnnnnnnnnnnnnnnnnnnnnnnnnnnnnnnnnnnnnnnnnnnnnnnnnnnnnnnnnnnnnnnnnnnnnnnnnnnnnnnnnnnnnnnnnnnnnnnnnnnnnnnnnnnnnnnnnnnnnnnnnnnnnnnnnnnnnnnnnnnnnnnnnnnnnnnnnnnnnnnnnnnnnnnnnnnnnnnnnnnnnnnnnnnnnnnnnnnnnnnnnnnnnnnnnnnnnnnnnnnnnnnnnnnnnnnnnnnnnnnnnnnnnnnnnnnnnnnnnnnnnnnnnnnnnnnnnnnnnnnnnnnnnnnnnnnnnnnnnnnnnnnnnnnnnnnnnnnnnnnnnnnnnnnnnnnnnnnnnnnnnnnnnnnnnnnnnnnnnnnnnnnnnnnnnnnnnnnnnnnnnnnnnnnnnnnnnnnnnnnnnnnnnnnnnnnnnnnnnnnnnnnnnnnnnnnnnnnnnnnnnnnnnnnnnnnnnnnnnnnnnnnnnnnnnnnnnnnnnnnnnnnnnnnnnnnnnnnnnnnnnnnnnnnnnnnnnnnnnnnnnnnnnnnnnnnnnnnnnnnnnnnnnnnnnnnnnnnnnnnnnnnnnnnnnnnnnnnnnnnnnnnnnnnnnnnnnnnnnnnnnnnnnnnnnnnnnnnnnnnnnnnnnnnnnnnnnnnnnnnnnnnnnnnnnnnnnnnnnnnnnnnnnnnnnnnnnnnnnnnnnnnnnnnnnnnnnnnnnnnnnnnnnnnnnnnnnnnnnnnnnnnnnnnnnnnnnnnnnnnnnnnnnnnnnnnnnnnnnnnnnnnnnnnnnnnnnnnnnnnnnnnnnnnnnnnnnnnnnnnnnnnnnnnnnnnnnnnnnnnnnnnnnnnnnnnnnnnnnnnnnnnnnnnnnnnnnnnnnnnnnnnnnnnnnnnnnnnnnnnnnnnnnnnnnnnnnnnnnnnnnnnnnnnnnnnnnnnnnnnnnnnnnnnnnnnnnnnnnnnnnnnnnnnnnnnnnnnnnnnnnnnnnnnnnnnnnnnnnnnnnnnnnnnnnnnnnnnnnnnnnnnnnnnnnnnnnnnnnnnnnnnnnnnnnnnnnnnnnnnnnnnnnnnnnnnnnnnnnnnnnnnnnnnnnnnnnnnnnnnnnnnnnnnnnnnnnnnnnnnnnnnnnnnnnnnnnnnnnnnnnnnnnnnnnnnnnnnnnnnnnnnnnnnnnnnnnnnnnnnnnnnnnnnnnnnnnnnnnnnnnnnnnnnnnnnnnnnnnnnnnnnnnnnnnnnnnnnnnnnnnnnnnnnnnnnnnnnnnnnnnnnnnnnnnnnnnnnnnnnnnnnnnnnnnnnnnnnnnnnnnnnnnnnnnnnnnnnnnnnnnnnnnnnnnnnnnnnnnnnnnnnnnnnnnnnnnnnnnnnnnnnnnnnnnnnnnnnnnnnnnnnnnnnnnnnnnnnnnnnnnnnnnnnnnnnnnnnnnnnnnnnnnnnnnnnnnnnnnnnnnnnnnnnnnnnnnnnnnnnnnnnnnnnnnnnnnnnnnnnnnnnnnnnnnnnnnnnnnnnnnnnnnnnnnnnnnnnnnnnnnnnnnnnnnnnnnnnnnnnnnnnnnnnnnnnnnnnnnnnnnnnnnnnnnnnnnnnnnnnnnnnnnnnnnnnnnnnnnnnnnnnnnnnnnnnnnnnnnnnnnnnnnnnnnnnnnnnnnnnnnnnnnnnnnnnnnnnnnnnnnnnnnnnnnnnnnnnnnnnnnnnnnnnnnnnnnnnnnnnnnnnnnnnnnnnnnnnnnnnnnnnnnnnnnnnnnnnnnnnnnnnnnnnnnnnnnnnnnnnnnnnnnnnnnnnnnnnnnnnnnnnnnnnnnnnnnnnnnnnnnnnnnnnnnnnnnnnnnnnnnnnnnnnnnnnnnnnnnnnnnnnnnnnnnnnnnnnnnnnnnnnnnnnnnnnnnnnnnnnnnnnnnnnnnnnnnnnnnnnnnnnnnnnnnnnnnnnnnnnnnnnnnnnnnnnnnnnnnnnnnnnnnnnnnnnnnnnnnnnnnnnnnnnnnnnnnnnnnnnnnnnnnnnnnnnnnnnnnnnnnnnnnnnnnnnnnnnnnnnnnnnnnnnnnnnnnnnnnnnnnnnnnnnnnnnnnnnnnnnnnnnnnnnnnnnnnnnnnnnnnnnnnnnnnnnnnnnnnnnnnnnnnnnnnnnnnnnnnnnnnnnnnnnnnnnnnnnnnnnnnnnnnnnnnnnnnnnnnnnnnnnnnnnnnnnnnnnnnnnnnnnnnnnnnnnnnnnnnnnnnnnnnnnnnnnnnnnnnnnnnnnnnnnnnnnnnnnnnnnnnnnnnnnnnnnnnnnnnnnnnnnnnnnnnnnnnnnnnnnnnnnnnnnnnnnnnnnnnnnnnnnnnnnnnnnnnnnnnnnnnnnnnnnnnnnnnnnnnnnnnnnnnnnnnnnnnnnnnnnnnnnnnnnnnnnnnnnnnnnnnnnnnnnnnnnnnnnnnnnnnnnnnnnnnnnnnnnnnnnnnnnnnnnnnnnnnnnnnnnnnnnnnnnnnnnnnnnnnnnnnnnnnnnnnnnnnnnnnnnnnnnnnnnnnnnnnnnnnnnnnnnnnnnnnnnnnnnnnnnnnnnnnnnnnnnnnnnnnnnnnnnnnnnnnnnnnnnnnnnnnnnnnnnnnnnnnnnnnnnnnnnnnnnnnnnnnnnnnnnnnnnnnnnnnnnnnnnnnnnnnnnnnnnnnnnnnnnnnnnnnnnnnnnnnnnnnnnnnnnnnnnnnnnnnnnnnnnnnnnnnnnnnnnnnnnnnnnnnnnnnnnnnnnnnnnnnnnnnnnnnnnnnnnnnnnnnnnnnnnnnnnnnnnnnnnnnnnnnnnnnnnnnnnnnnnnnnnnnnnnnnnnnnnnnnnnnnnnnnnnnnnnnnnnnnnnnnnnnnnnnnnnnnnnnnnnnnnnnnnnnnnnnnnnnnnnnnnnnnnnnnnnnnnnnnnnnnnnnnnnnnnnnnnnnnnnnnnnnnnnnnnnnnnnnnnnnnnnnnnnnnnnnnnnnnnnnnnnnnnnnnnnnnnnnnnnnnnnnnnnnnnnnnnnnnnnnnnnnnnnnnnnnnnnnnnnnnnnnnnnnnnnnnnnnnnnnnnnnnnnnnnnnnnnnnnnnnnnnnnnnnnnnnnnnnnnnnnnnnnnnnnnnnnnnnnnnnnnnnnnnnnnnnnnnnnnnnnnnnnnnnnnnnnnnnnnnnnnnnnnnnnnnnnnnnnnnnnnnnnnnnnnnnnnnnnnnnnnnnnnnnnnnnnnnnnnnnnnnnnnnnnnnnnnnnnnnnnnnnnnnnnnnnnnnnnnnnnnnnnnnnnnnnnnnnnnnnnnnnnnnnnnnnnnnnnnnnnnnnnnnnnnnnnnnnnnnnnnnnnnnnnnnnnnnnnnnnnnnnnnnnnnnnnnnnnnnnnnnnnnnnnnnnnnnnnnnnnnnnnnnnnnnnnnnnnnnnnnnnnnnnnnnnnnnnnnnnnnnnnnnnnnnnnnnnnnnnnnnnnnnnnnnnnnnnnnnnnnnnnnnnnnnnnnnnnnnnnnnnnnnnnnnnnnnnnnnnnnnnnnnnnnnnnnnnnnnnnnnnnnnnnnnnnnnnnnnnnnnnnnnnnnnnnnnnnnnnnnnnnnnnnnnnnnnnnnnnnnnnnnnnnnnnnnnnnnnnnnnnnnnnnnnnnnnnnnnnnnnnnnnnnnnnnnnnnnnnnnnnnnnnnnnnnnnnnnnnnnnnnnnnnnnnnnnnnnnnnnnnnnnnnnnnnnnnnnnnnnnnnnnnnnnnnnnnnnnnnnnnnnnnnnnnnnnnnnnnnnnnnnnnnnnnnnnnnnnnnnnnnnnnnnnnnnnnnnnnnnnnnnnnnnnnnnnnnnnnnnnnnnnnnnnnnnnnnnnnnnnnnnnnnnnnnnnnnnnnnnnnnnnnnnnnnnnnnnnnnnnnnnnnnnnnnnnnnnnnnnnnnnnnnnnnnnnnnnnnnnnnnnnnnnnnnnnnnnnnnnnnnnnnnnnnnnnnnnnnnnnnnnnnnnnnnnnnnnnnnnnnnnnnnnnnnnnnnnnnnnnnnnnnnnnnnnnnnnnnnnnnnnnnnnnnnnnnnnnnnnnnnnnnnnnnnnnnnnnnnnnnnnnnnnnnnnnnnnnnnnnnnnnnnnnnnnnnnnnnnnnnnnnnnnnnnnnnnnnnnnnnnnnnnnnnnnnnnnnnnnnnnnnnnnnnnnnnnnnnnnnnnnnnnnnnnnnnnnnnnnnnnnnnnnnnnnnnnnnnnnnnnnnnnnnnnnnnnnnnnnnnnnnnnnnnnnnnnnnnnnnnnnnnnnnnnnnnnnnnnnnnnnnnnnnnnnnnnnnnnnnnnnnnnnnnnnnnnnnnnnnnnnnnnnnnnnnnnnnnnnnnnnnnnnnnnnnnnnnnnnnnnnnnnnnnnnnnnnnnnnnnnnnnnnnnnnnnnnnnnnnnnnnnnnnnnnnnnnnnnnnnnnnnnnnnnnnnnnnnnnnnnnnnnnnnnnnnnnnnnnnnnnnnnnnnnnnnnnnnnnnnnnnnnnnnnnnnnnnnnnnnnnnnnnnnnnnnnnnnnnnnnnnnnnnnnnnnnnnnnnnnnnnnnnnnnnnnnnnnnnnnnnnnnnnnnnnnnnnnnnnnnnnnnnnnnnnnnnnnnnnnnnnnnnnnnnnnnnnnnnnnnnnnnnnnnnnnnnnnnnnnnnnnnnnnnnnnnnnnnnnnnnnnnnnnnnnnnnnnnnnnnnnnnnnnnnnnnnnnnnnnnnnnnnnnnnnnnnnnnnnnnnnnnnnnnnnnnnnnnnnnnnnnnnnnnnnnnnnnnnnnnnnnnnnnnnnnnnnnnnnnnnnnnnnnnnnnnnnnnnnnnnnnnnnnnnnnnnnnnnnnnnnnnnnnnnnnnnnnnnnnnnnnnnnnnnnnnnnnnnnnnnnnnnnnnnnnnnnnnnnnnnnnnnnnnnnnnnnnnnnnnnnnnnnnnnnnnnnnnnnnnnnnnnnnnnnnnnnnnnnnnnnnnnnnnnnnnnnnnnnnnnnnnnnnnnnnnnnnnnnnnnnnnnnnnnnnnnnnnnnnnnnnnnnnnnnnnnnnnnnnnnnnnnnnnnnnnnnnnnnnnnnnnnnnnnnnnnnnnnnnnnnnnnnnnnnnnnnnnnnnnnnnnnnnnnnnnnnnnnnnnnnnnnnnnnnnnnnnnnnnnnnnnnnnnnnnnnnnnnnnnnnnnnnnnnnnnnnnnnnnnnnnnnnnnnnnnnnnnnnnnnnnnnnnnnnnnnnnnnnnnnnnnnnnnnnnnnnnnnnnnnnnnnnnnnnnnnnnnnnnnnnnnnnnnnnnnnnnnnnnnnnnnnnnnnnnnnnnnnnnnnnnnnnnnnnnnnnnnnnnnnnnnnnnnnnnnnnnnnnnnnnnnnnnnnnnnnnnnnnnnnnnnnnnnnnnnnnnnnnnnnnnnnnnnnnnnnnnnnnnnnnnnnnnnnnnnnnnnnnnnnnnnnnnnnnnnnnnnnnnnnnnnnnnnnnnnnnnnnnnnnnnnnnnnnnnnnnnnnnnnnnnnnnnnnnnnnnnnnnnnnnnnnnnnnnnnnnnnnnnnnnnnnnnnnnnnnnnnnnnnnnnnnnnnnnnnnnnnnnnnnnnnnnnnnnnnnnnnnnnnnnnnnnnnnnnnnnnnnnnnnnnnnnnnnnnnnnnnnnnnnnnnnnnnnnnnnnnnnnnnnnnnnnnnnnnnnnnnnnnnnnnnnnnnnnnnnnnnnnnnnnnnnnnnnnnnnnnnnnnnnnnnnnnnnnnnnnnnnnnnnnnnnnnnnnnnnnnnnnnnnnnnnnnnnnnnnnnnnnnnnnnnnnnnnnnnnnnnnnnnnnnnnnnnnnnnnnnnnnnnnnnnnnnnnnnnnnnnnnnnnnnnnnnnnnnnnnnnnnnnnnnnnnnnnnnnnnnnnnnnnnnnnnnnnnnnnnnnnnnnnnnnnnnnnnnnnnnnnnnnnnnnnnnnnnnnnnnnnnnnnnnnnnnnnnnnnnnnnnnnnnnnnnnnnnnnnnnnnnnnnnnnnnnnnnnnnnnnnnnnnnnnnnnnnnnnnnnnnnnnnnnnnnnnnnnnnnnnnnnnnnnnnnnnnnnnnnnnnnnnnnnnnnnnnnnnnnnnnnnnnnnnnnnnnnnnnnnnnnnnnnnnnnnnnnnnnnnnnnnnnnnnnnnnnnnnnnnnnnnnnnnnnnnnnnnnnnnnnnnnnnnnnnnnnnnnnnnnnnnnnnnnnnnnnnnnnnnnnnnnnnnnnnnnnnnnnnnnnnnnnnnnnnnnnnnnnnnnnnnnnnnnnnnnnnnnnnnnnnnnnnnnnnnnnnnnnnnnnnnnnnnnnnnnnnnnnnnnnnnnnnnnnnnnnnnnnnnnnnnnnnnnnnnnnnnnnnnnnnnnnnnnnnnnnnnnnnnnnnnnnnnnnnnnnnnnnnnnnnnnnnnnnnnnnnnnnnnnnnnnnnnnnnnnnnnnnnnnnnnnnnnnnnnnnnnnnnnnnnnnnnnnnnnnnnnnnnnnnnnnnnnnnnnnnnnnnnnnnnnnnnnnnnnnnnnnnnnnnnnnnnnnnnnnnnnnnnnnnnnnnnnnnnnnnnnnnnnnnnnnnnnnnnnnnnnnnnnnnnnnnnnnnnnnnnnnnnnnnnnnnnnnnnnnnnnnnnnnnnnnnnnnnnnnnnnnnnnnnnnnnnnnnnnnnnnnnnnnnnnnnnnnnnnnnnnnnnnnnnnnnnnnnnnnnnnnnnnnnnnnnnnnnnnnnnnnnnnnnnnnnnnnnnnnnnnnnnnnnnnnnnnnnnnnnnnnnnnnnnnnnnnnnnnnnnnnnnnnnnnnnnnnnnnnnnnnnnnnnnnnnnnnnnnnnnnnnnnnnnnnnnnnnnnnnnnnnnnnnnnnnnnnnnnnnnnnnnnnnnnnnnnnnnnnnnnnnnnnnnnnnnnnnnnnnnnnnnnnnnnnnnnnnnnnnnnnnnnnnnnnnnnnnnnnnnnnnnnnnnnnnnnnnnnnnnnnnnnnnnnnnnnnnnnnnnnnnnnnnnnnnnnnnnnnnnnnnnnnnnnnnnnnnnnnnnnnnnnnnnnnnnnnnnnnnnnnnnnnnnnnnnnnnnnnnnnnnnnnnnnnnnnnnnnnnnnnnnnnnnnnnnnnnnnnnnnnnnnnnnnnnnnnnnnnnnnnnnnnnnnnnnnnnnnnnnnnnnnnnnnnnnnnnnnnnnnnnnnnnnnnnnnnnnnnnnnnnnnnnnnnnnnnnnnnnnnnnnnnnnnnnnnnnnnnnnnnnnnnnnnnnnnnnnnnnnnnnnnnnnnnnnnnnnnnnnnnnnnnnnnnnnnnnnnnnnnnnnnnnnnnnnnnnnnnnnnnnnnnnnnnnnnnnnnnnnnnnnnnnnnnnnnnnnnnnnnnnnnnnnnnnnnnnnnnnnnnnnnnnnnnnnnnnnnnnnnnnnnnnnnnnnnnnnnnnnnnnnnnnnnnnnnnnnnnnnnnnnnnnnnnnnnnnnnnnnnnnnnnnnnnnnnnnnnnnnnnnnnnnnnnnnnnnnnnnnnnnnnnnnnnnnnnnnnnnnnnnnnnnnnnnnnnnnnnnnnnnnnnnnnnnnnnnnnnnnnnnnnnnnnnnnnnnnnnnnnnnnnnnnnnnnnnnnnnnnnnnnnnnnnnnnnnnnnnnnnnnnnnnnnnnnnnnnnnnnnnnnnnnnnnnnnnnnnnnnnnnnnnnnnnnnnnnnnnnnnnnnnnnnnnnnnnnnnnnnnnnnnnnnnnnnnnnnnnnnnnnnnnnnnnnnnnnnnnnnnnnnnnnnnnnnnnnnnnnnnnnnnnnnnnnnnnnnnnnnnnnnnnnnnnnnnnnnnnnnnnnnnnnnnnnnnnnnnnnnnnnnnnnnnnnnnnnnnnnnnnnnnnnnnnnnnnnnnnnnnnnnnnnnnnnnnnnnnnnnnnnnnnnnnnnnnnnnnnnnnnnnnnnnnnnnnnnnnnnnnnnnnnnnnnnnnnnnnnnnnnnnnnnnnnnnnnnnnnnnnnnnnnnnnnnnnnnnnnnnnnnnnnnnnnnnnnnnnnnnnnnnnnnnnnnnnnnnnnnnnnnnnnnnnnnnnnnnnnnnnnnnnnnnnnnnnnnnnnnnnnnnnnnnnnnnnnnnnnnnnnnnnnnnnnnnnnnnnnnnnnnnnnnnnnnnnnnnnnnnnnnnnnnnnnnnnnnnnnnnnnnnnnnnnnnnnnnnnnnnnnnnnnnnnnnnnnnnnnnnnnnnnnnnnnnnnnnnnnnnnnnnnnnnnnnnnnnnnnnnnnnnnnnnnnnnnnnnnnnnnnnnnnnnnnnnnnnnnnnnnnnnnnnnnnnnnnnnnnnnnnnnnnnnnnnnnnnnnnnnnnnnnnnnnnnnnnnnnnnnnnnnnnnnnnnnnnnnnnnnnnnnnnnnnnnnnnnnnnnnnnnnnnnnnnnnnnnnnnnnnnnnnnnnnnnnnnnnnnnnnnnnnnnnnnnnnnnnnnnnnnnnnnnnnnnnnnnnnnnnnnnnnnnnnnnnnnnnnnnnnnnnnnnnnnnnnnnnnnnnnnnnnnnnnnnnnnnnnnnnnnnnnnnnnnnnnnnnnnnnnnnnnnnnnnnnnnnnnnnnnnnnnnnnnnnnnnnnnnnnnnnnnnnnnnnnnnnnnnnnnnnnnnnnnnnnnnnnnnnnnnnnnnnnnnnnnnnnnnnnnnnnnnnnnnnnnnnnnnnnnnnnnnnnnnnnnnnnnnnnnnnnnnnnnnnnnnnnnnnnnnnnnnnnnnnnnnnnnnnnnnnnnnnnnnnnnnnnnnnnnnnnnnnnnnnnnnnnnnnnnnnnnnnnnnnnnnnnnnnnnnnnnnnnnnnnnnnnnnnnnnnnnnnnnnnnnnnnnnnnnnnnnnnnnnnnnnnnnnnnnnnnnnnnnnnnnnnnnnnnnnnnnnnnnnnnnnnnnnnnnnnnnnnnnnnnnnnnnnnnnnnnnnnnnnnnnnnnnnnnnnnnnnnnnnnnnnnnnnnnnnnnnnnnnnnnnnnnnnnnnnnnnnnnnnnnnnnnnnnnnnnnnnnnnnnnnnnnnnnnnnnnnnnnnnnnnnnnnnnnnnnnnnnnnnnnnnnnnnnnnnnnnnnnnnnnnnnnnnnnnnnnnnnnnnnnnnnnnnnnnnnnnnnnnnnnnnnnnnnnnnnnnnnnnnnnnnnnnnnnnnnnnnnnnnnnnnnnnnnnnnnnnnnnnnnnnnnnnnnnnnnnnnnnnnnnnnnnnnnnnnnnnnnnnnnnnnnnnnnnnnnnnnnnnnnnnnnnnnnnnnnnnnnnnnnnnnnnnnnnnnnnnnnnnnnnnnnnnnnnnnnnnnnnnnnnnnnnnnnnnnnnnnnnnnnnnnnnnnnnnnnnnnnnnnnnnnnnnnnnnnnnnnnnnnnnnnnnnnnnnnnnnnnnnnnnnnnnnnnnnnnnnnnnnnnnnnnnnnnnnnnnnnnnnnnnnnnnnnnnnnnnnnnnnnnnnnnnnnnnnnnnnnnnnnnnnnnnnnnnnnnnnnnnnnnnnnnnnnnnnnnnnnnnnnnnnnnnnnnnnnnnnnnnnnnnnnnnnnnnnnnnnnnnnnnnnnnnnnnnnnnnnnnnnnnnnnnnnnnnnnnnnnnnnnnnnnnnnnnnnnnnnnnnnnnnnnnnnnnnnnnnnnnnnnnnnnnnnnnnnnnnnnnnnnnnnnnnnnnnnnnnnnnnnnnnnnnnnnnnnnnnnnnnnnnnnnnnnnnnnnnnnnnnnnnnnnnnnnnnnnnnnnnnnnnnnnnnnnnnnnnnnnnnnnnnnnnnnnnnnnnnnnnnnnnnnnnnnnnnnnnnnnnnnnnnnnnnnnnnnnnnnnnnnnnnnnnnnnnnnnnnnnnnnnnnnnnnnnnnnnnnnnnnnnnnnnnnnnnnnnnnnnnnnnnnnnnnnnnnnnnnnnnnnnnnnnnnnnnnnnnnnnnnnnnnnnnnnnnnnnnnnnnnnnnnnnnnnnnnnnnnnnnnnnnnnnnnnnnnnnnnnnnnnnnnnnnnnnnnnnnnnnnnnnnnnnnnnnnnnnnnnnnnnnnnnnnnnnnnnnnnnnnnnnnnnnnnnnnnnnnnnnnnnnnnnnnnnnnnnnnnnnnnnnnnnnnnnnnnnnnnnnnnnnnnnnnnnnnnnnnnnnnnnnnnnnnnnnnnnnnnnnnnnnnnnnnnnnnnnnnnnnnnnnnnnnnnnnnnnnnnnnnnnnnnnnnnnnnnnnnnnnnnnnnnnnnnnnnnnnnnnnnnnnnnnnnnnnnnnnnnnnnnnnnnnnnnnnnnnnnnnnnnnnnnnnnnnnnnnnnnnnnnnnnnnnnnnnnnnnnnnnnnnnnnnnnnnnnnnnnnnnnnnnnnnnnnnnnnnnnnnnnnnnnnnnnnnnnnnnnnnnnnnnnnnnnnnnnnnnnnnnnnnnnnnnnnnnnnnnnnnnnnnnnnnnnnnnnnnnnnnnnnnnnnnnnnnnnnnnnnnnnnnnnnnnnnnnnnnnnnnnnnnnnnnnnnnnnnnnnnnnnnnnnnnnnnnnnnnnnnnnnnnnnnnnnnnnnnnnnnnnnnnnnnnnnnnnnnnnnnnnnnnnnnnnnnnnnnnnnnnnnnnnnnnnnnnnnnnnnnnnnnnnnnnnnnnnnnnnnnnnnnnnnnnnnnnnnnnnnnnnnnnnnnnnnnnnnnnnnnnnnnnnnnnnnnnnnnnnnnnnnnnnnnnnnnnnnnnnnnnnnnnnnnnnnnnnnnnnnnnnnnnnnnnnnnnnnnnnnnnnnnnnnnnnnnnnnnnnnnnnnnnnnnnnnnnnnnnnnnnnnnnnnnnnnnnnnnnnnnnnnnnnnnnnnnnnnnnnnnnnnnnnnnnnnnnnnnnnnnnnnnnnnnnnnnnnnnnnnnnnnnnnnnnnnnnnnnnnnnnnnnnnnnnnnnnnnnnnnnnnnnnnnnnnnnnnnnnnnnnnnnnnnnnnnnnnnnnnnnnnnnnnnnnnnnnnnnnnnnnnnnnnnnnnnnnnnnnnnnnnnnnnnnnnnnnnnnnnnnnnnnnnnnnnnnnnnnnnnnnnnnnnnnnnnnnnnnnnnnnnnnnnnnnnnnnnnnnnnnnnnnnnnnnnnnnnnnnnnnnnnnnnnnnnnnnnnnnnnnnnnnnnnnnnnnnnnnnnnnnnnnnnnnnnnnnnnnnnnnnnnnnnnnnnnnnnnnnnnnnnnnnnnnnnnnnnnnnnnnnnnnnnnnnnnnnnnnnnnnnnnnnnnnnnnnnnnnnnnnnnnnnnnnnnnnnnnnnnnnnnnnnnnnnnnnnnnnnnnnnnnnnnnnnnnnnnnnnnnnnnnnnnnnnnnnnnnnnnnnnnnnnnnnnnnnnnnnnnnnnnnnnnnnnnnnnnnnnnnnnnnnnnnnnnnnnnnnnnnnnnnnnnnnnnnnnnnnnnnnnnnnnnnnnnnnnnnnnnnnnnnnnnnnnnnnnnnnnnnnnnnnnnnnnnnnnnnnnnnnnnnnnnnnnnnnnnnnnnnnnnnnnnnnnnnnnnnnnnnnnnnnnnnnnnnnnnnnnnnnnnnnnnnnnnnnnnnnnnnnnnnnnnnnnnnnnnnnnnnnnnnnnnnnnnnnnnnnnnnnnnnnnnnnnnnnnnnnnnnnnnnnnnnnnnnnnnnnnnnnnnnnnnnnnnnnnnnnnnnnnnnnnnnnnnnnnnnnnnnnnnnnnnnnnnnnnnnnnnnnnnnnnnnnnnnnnnnnnnnnnnnnnnnnnnnnnnnnnnnnnnnnnnnnnnnnnnnnnnnnnnnnnnnnnnnnnnnnnnnnnnnnnnnnnnnnnnnnnnnnnnnnnnnnnnnnnnnnnnnnnnnnnnnnnnnnnnnnnnnnnnnnnnnnnnnnnnnnnnnnnnnnnnnnnnnnnnnnnnnnnnnnnnnnnnnnnnnnnnnnnnnnnnnnnnnnnnnnnnnnnnnnnnnnnnnnnnnnnnnnnnnnnnnnnnnnnnnnnnnnnnnnnnnnnnnnnnnnnnnnnnnnnnnnnnnnnnnnnnnnnnnnnnnnnnnnnnnnnnnnnnnnnnnnnnnnnnnnnnnnnnnnnnnnnnnnnnnnnnnnnnnnnnnnnnnnnnnnnnnnnnnnnnnnnnnnnnnnnnnnnnnnnnnnnnnnnnnnnnnnnnnnnnnnnnnnnnnnnnnnnnnnnnnnnnnnnnnnnnnnnnnnnnnnnnnnnnnnnnnnnnnnnnnnnnnnnnnnnnnnnnnnnnnnnnnnnnnnnnnnnnnnnnnnnnnnnnnnnnnnnnnnnnnnnnnnnnnnnnnnnnnnnnnnnnnnnnnnnnnnnnnnnnnnnnnnnnnnnnnnnnnnnnnnnnnnnnnnnnnnnnnnnnnnnnnnnnnnnnnnnnnnnnnnnnnnnnnnnnnnnnnnnnnnnnnnnnnnnnnnnnnnnnnnnnnnnnnnnnnnnnnnnnnnnnnnnnnnnnnnnnnnnnnnnnnnnnnnnnnnnnnnnnnnnnnnnnnnnnnnnnnnnnnnnnnnnnnnnnnnnnnnnnnnnnnnnnnnnnnnnnnnnnnnnnnnnnnnnnnnnnnnnnnnnnnnnnnnnnnnnnnnnnnnnnnnnnnnnnnnnnnnnnnnnnnnnnnnnnnnnnnnnnnnnnnnnnnnnnnnnnnnnnnnnnnnnnnnnnnnnnnnnnnnnnnnnnnnnnnnnnnnnnnnnnnnnnnnnnnnnnnnnnnnnnnnnnnnnnnnnnnnnnnnnnnnnnnnnnnnnnnnnnnnnnnnnnnnnnnnnnnnnnnnnnnnnnnnnnnnnnnnnnnnnnnnnnnnnnnnnnnnnnnnnnnnnnnnnnnnnnnnnnnnnnnnnnnnnnnnnnnnnnnnnnnnnnnnnnnnnnnnnnnnnnnnnnnnnnnnnnnnnnnnnnnnnnnnnnnnnnnnnnnnnnnnnnnnnnnnnnnnnnnnnnnnnnnnnnnnnnnnnnnnnnnnnnnnnnnnnnnnnnnnnnnnnnnnnnnnnnnnnnnnnnnnnnnnnnnnnnnnnnnnnnnnnnnnnnnnnnnnnnnnnnnnnnnnnnnnnnnnnnnnnnnnnnnnnnnnnnnnnnnnnnnnnnnnnnnnnnnnnnnnnnnnnnnnnnnnnnnnnnnnnnnnnnnnnnnnnnnnnnnnnnnnnnnnnnnnnnnnnnnnnnnnnnnnnnnnnnnnnnnnnnnnnnnnnnnnnnnnnnnnnnnnnnnnnnnnnnnnnnnnnnnnnnnnnnnnnnnnnnnnnnnnnnnnnnnnnnnnnnnnnnnnnnnnnnnnnnnnnnnnnnnnnnnnnnnnnnnnnnnnnnnnnnnnnnnnnnnnnnnnnnnnnnnnnnnnnnnnnnnnnnnnnnnnnnnnnnnnnnnnnnnnnnnnnnnnnnnnnnnnnnnnnnnnnnnnnnnnnnnnnnnnnnnnnnnnnnnnnnnnnnnnnnnnnnnnnnnnnnnnnnnnnnnnnnnnnnnnnnnnnnnnnnnnnnnnnnnnnnnnnnnnnnnnnnnnnnnnnnnnnnnnnnnnnnnnnnnnnnnnnnnnnnnnnnnnnnnnnnnnnnnnnnnnnnnnnnnnnnnnnnnnnnnnnnnnnnnnnnnnnnnnnnnnnnnnnnnnnnnnnnnnnnnnnnnnnnnnnnnnnnnnnnnnnnnnnnnnnnnnnnnnnnnnnnnnnnnnnnnnnnnnnnnnnnnnnnnnnnnnnnnnnnnnnnnnnnnnnnnnnnnnnnnnnnnnnnnnnnnnnnnnnnnnnnnnnnnnnnnnnnnnnnnnnnnnnnnnnnnnnnnnnnnnnnnnnnnnnnnnnnnnnnnnnnnnnnnnnnnnnnnnnnnnnnnnnnnnnnnnnnnnnnnnnnnnnnnnnnnnnnnnnnnnnnnnnnnnnnnnnnnnnnnnnnnnnnnnnnnnnnnnnnnnnnnnnnnnnnnnnnnnnnnnnnnnnnnnnnnnnnnnnnnnnnnnnnnnnnnnnnnnnnnnnnnnnnnnnnnnnnnnnnnnnnnnnnnnnnnnnnnnnnnnnnnnnnnnnnnnnnnnnnnnnnnnnnnnnnnnnnnnnnnnnnnnnnnnnnnnnnnnnnnnnnnnnnnnnnnnnnnnnnnnnnnnnnnnnnnnnnnnnnnnnnnnnnnnnnnnnnnnnnnnnnnnnnnnnnnnnnnnnnnnnnnnnnnnnnnnnnnnnnnnnnnnnnnnnnnnnnnnnnnnnnnnnnnnnnnnnnnnnnnnnnnnnnnnnnnnnnnnnnnnnnnnnnnnnnnnnnnnnnnnnnnnnnnnnnnnnnnnnnnnnnnnnnnnnnnnnnnnnnnnnnnnnnnnnnnnnnnnnnnnnnnnnnnnnnnnnnnnnnnnnnnnnnnnnnnnnnnnnnnnnnnnnnnnnnnnnnnnnnnnnnnnnnnnnnnnnnnnnnnnnnnnnnnnnnnnnnnnnnnnnnnnnnnnnnnnnnnnnnnnnnnnnnnnnnnnnnnnnnnnnnnnnnnnnnnnnnnnnnnnnnnnnnnnnnnnnnnnnnnnnnnnnnnnnnnnnnnnnnnnnnnnnnnnnnnnnnnnnnnnnnnnnnnnnnnnnnnnnnnnnnnnnnnnnnnnnnnnnnnnnnnnnnnnnnnnnnnnnnnnnnnnnnnnnnnnnnnnnnnnnnnnnnnnnnnnnnnnnnnnnnnnnnnnnnnnnnnnnnnnnnnnnnnnnnnnnnnnnnnnnnnnnnnnnnnnnnnnnnnnnnnnnnnnnnnnnnnnnnnnnnnnnnnnnnnnnnnnnnnnnnnnnnnnnnnnnnnnnnnnnnnnnnnnnnnnnnnnnnnnnnnnnnnnnnnnnnnnnnnnnnnnnnnnnnnnnnnnnnnnnnnnnnnnnnnnnnnnnnnnnnnnnnnnnnnnnnnnnnnnnnnnnnnnnnnnnnnnnnnnnnnnnnnnnnnnnnnnnnnnnnnnnnnnnnnnnnnnnnnnnnnnnnnnnnnnnnnnnnnnnnnnnnnnnnnnnnnnnnnnnnnnnnnnnnnnnnnnnnnnnnnnnnnnnnnnnnnnnnnnnnnnnnnnnnnnnnnnnnnnnnnnnnnnnnnnnnnnnnnnnnnnnnnnnnnnnnnnnnnnnnnnnnnnnnnnnnnnnnnnnnnnnnnnnnnnnnnnnnnnnnnnnnnnnnnnnnnnnnnnnnnnnnnnnnnnnnnnnnnnnnnnnnnnnnnnnnnnnnnnnnnnnnnnnnnnnnnnnnnnnnnnnnnnnnnnnnnnnnnnnnnnnnnnnnnnnnnnnnnnnnnnnnnnnnnnnnnnnnnnnnnnnnnnnnnnnnnnnnnnnnnnnnnnnnnnnnnnnnnnnnnnnnnnnnnnnnnnnnnnnnnnnnnnnnnnnnnnnnnnnnnnnnnnnnnnnnnnnnnnnnnnnnnnnnnnnnnnnnnnnnnnnnnnnnnnnnnnnnnnnnnnnnnnnnnnnnnnnnnnnnnnnnnnnnnnnnnnnnnnnnnnnnnnnnnnnnnnnnnnnnnnnnnnnnnnnnnnnnnnnnnnnnnnnnnnnnnnnnnnnnnnnnnnnnnnnnnnnnnnnnnnnnnnnnnnnnnnnnnnnnnnnnnnnnnnnnnnnnnnnnnnnnnnnnnnnnnnnnnnnnnnnnnnnnnnnnnnnnnnnnnnnnnnnnnnnnnnnnnnnnnnnnnnnnnnnnnnnnnnnnnnnnnnnnnnnnnnnnnnnnnnnnnnnnnnnnnnnnnnnnnnnnnnnnnnnnnnnnnnnnnnnnnnnnnnnnnnnnnnnnnnnnnnnnnnnnnnnnnnnnnnnnnnnnnnnnnnnnnnnnnnnnnnnnnnnnnnnnnnnnnnnnnnnnnnnnnnnnnnnnnnnnnnnnnnnnnnnnnnnnnnnnnnnnnnnnnnnnnnnnnnnnnnnnnnnnnnnnnnnnnnnnnnnnnnnnnnnnnnnnnnnnnnnnnnnnnnnnnnnnnnnnnnnnnnnnnnnnnnnnnnnnnnnnnnnnnnnnnnnnnnnnnnnnnnnnnnnnnnnnnnnnnnnnnnnnnnnnnnnnnnnnnnnnnnnnnnnnnnnnnnnnnnnnnnnnnnnnnnnnnnnnnnnnnnnnnnnnnnnnnnnnnnnnnnnnnnnnnnnnnnnnnnnnnnnnnnnnnnnnnnnnnnnnnnnnnnnnnnnnnnnnnnnnnnnnnnnnnnnnnnnnnnnnnnnnnnnnnnnnnnnnnnnnnnnnnnnnnnnnnnnnnnnnnnnnnnnnnnnnnnnnnnnnnnnnnnnnnnnnnnnnnnnnnnnnnnnnnnnnnnnnnnnnnnnnnnnnnnnnnnnnnnnnnnnnnnnnnnnnnnnnnnnnnnnnnnnnnnnnnnnnnnnnnnnnnnnnnnnnnnnnnnnnnnnnnnnnnnnnnnnnnnnnnnnnnnnnnnnnnnnnnnnnnnnnnnnnnnnnnnnnnnnnnnnnnnnnnnnnnnnnnnnnnnnnnnnnnnnnnnnnnnnnnnnnnnnnnnnnnnnnnnnnnnnnnnnnnnnnnnnnnnnnnnnnnnnnnnnnnnnnnnnnnnnnnnnnnnnnnnnnnnnnnnnnnnnnnnnnnnnnnnnnnnnnnnnnnnnnnnnnnnnnnnnnnnnnnnnnnnnnnnnnnnnnnnnnnnnnnnnnnnnnnnnnnnnnnnnnnnnnnnnnnnnnnnnnnnnnnnnnnnnnnnnnnnnnnnnnnnnnnnnnnnnnnnnnnnnnnnnnnnnnnnnnnnnnnnnnnnnnnnnnnnnnnnnnnnnnnnnnnnnnnnnnnnnnnnnnnnnnnnnnnnnnnnnnnnnnnnnnnnnnnnnnnnnnnnnnnnnnnnnnnnnnnnnnnnnnnnnnnnnnnnnnnnnnnnnnnnnnnnnnnnnnnnnnnnnnnnnnnnnnnnnnnnnnnnnnnnnnnnnnnnnnnnnnnnnnnnnnnnnnnnnnnnnnnnnnnnnnnnnnnnnnnnnnnnnnnnnnnnnnnnnnnnnnnnnnnnnnnnnnnnnnnnnnnnnnnnnnnnnnnnnnnnnnnnnnnnnnnnnnnnnnnnnnnnnnnnnnnnnnnnnnnnnnnnnnnnnnnnnnnnnnnnnnnnnnnnnnnnnnnnnnnnnnnnnnnnnnnnnnnnnnnnnnnnnnnnnnnnnnnnnnnnnnnnnnnnnnnnnnnnnnnnnnnnnnnnnnnnnnnnnnnnnnnnnnnnnnnnnnnnnnnnnnnnnnnnnnnnnnnnnnnnnnnnnnnnnnnnnnnnnnnnnnnnnnnnnnnnnnnnnnnnnnnnnnnnnnnnnnnnnnnnnnnnnnnnnnnnnnnnnnnnnnnnnnnnnnnnnnnnnnnnnnnnnnnnnnnnnnnnnnnnnnnnnnnnnnnnnnnnnnnnnnnnnnnnnnnnnnnnnnnnnnnnnnnnnnnnnnnnnnnnnnnnnnnnnnnnnnnnnnnnnnnnnnnnnnnnnnnnnnnnnnnnnnnnnnnnnnnnnnnnnnnnnnnnnnnnnnnnnnnnnnnnnnnnnnnnnnnnnnnnnnnnnnnnnnnnnnnnnnnnnnnnnnnnnnnnnnnnnnnnnnnnnnnnnnnnnnnnnnnnnnnnnnnnnnnnnnnnnnnnnnnnnnnnnnnnnnnnnnnnnnnnnnnnnnnnnnnnnnnnnnnnnnnnnnnnnnnnnnnnnnnnnnnnnnnnnnnnnnnnnnnnnnnnnnnnnnnnnnnnnnnnnnnnnnnnnnnnnnnnnnnnnnnnnnnnnnnnnnnnnnnnnnnnnnnnnnnnnnnnnnnnnnnnnnnnnnnnnnnnnnnnnnnnnnnnnnnnnnnnnnnnnnnnnnnnnnnnnnnnnnnnnnnnnnnnnnnnnnnnnnnnnnnnnnnnnnnnnnnnnnnnnnnnnnnnnnnnnnnnnnnnnnnnnnnnnnnnnnnnnnnnnnnnnnnnnnnnnnnnnnnnnnnnnnnnnnnnnnnnnnnnnnnnnnnnnnnnnnnnnnnnnnnnnnnnnnnnnnnnnnnnnnnnnnnnnnnnnnnnnnnnnnnnnnnnnnnnnnnnnnnnnnnnnnnnnnnnnnnnnnnnnnnnnnnnnnnnnnnnnnnnnnnnnnnnnnnnnnnnnnnnnnnnnnnnnnnnnnnnnnnnnnnnnnnnnnnnnnnnnnnnnnnnnnnnnnnnnnnnnnnnnnnnnnnnnnnnnnnnnnnnnnnnnnnnnnnnnnnnnnnnnnnnnnnnnnnnnnnnnnnnnnnnnnnnnnnnnnnnnnnnnnnnnnnnnnnnnnnnnnnnnnnnnnnnnnnnnnnnnnnnnnnnnnnnnnnnnnnnnnnnnnnnnnnnnnnnnnnnnnnnnnnnnnnnnnnnnnnnnnnnnnnnnnnnnnnnnnnnnnnnnnnnnnnnnnnnnnnnnnnnnnnnnnnnnnnnnnnnnnnnnnnnnnnnnnnnnnnnnnnnnnnnnnnnnnnnnnnnnnnnnnnnnnnnnnnnnnnnnnnnnnnnnnnnnnnnnnnnnnnnnnnnnnnnnnnnnnnnnnnnnnnnnnnnnnnnnnnnnnnnnnnnnnnnnnnnnnnnnnnnnnnnnnnnnnnnnnnnnnnnnnnnnnnnnnnnnnnnnnnnnnnnnnnnnnnnnnnnnnnnnnnnnnnnnnnnnnnnnnnnnnnnnnnnnnnnnnnnnnnnnnnnnnnnnnnnnnnnnnnnnnnnnnnnnnnnnnnnnnnnnnnnnnnnnnnnnnnnnnnnnnnnnnnnnnnnnnnnnnnnnnnnnnnnnnnnnnnnnnnnnnnnnnnnnnnnnnnnnnnnnnnnnnnnnnnnnnnnnnnnnnnnnnnnnnnnnnnnnnnnnnnnnnnnnnnnnnnnnnnnnnnnnnnnnnnnnnnnnnnnnnnnnnnnnnnnnnnnnnnnnnnnnnnnnnnnnnnnnnnnnnnnnnnnnnnnnnnnnnnnnnnnnnnnnnnnnnnnnnnnnnnnnnnnnnnnnnnnnnnnnnnnnnnnnnnnnnnnnnnnnnnnnnnnnnnnnnnnnnnnnnnnnnnnnnnnnnnnnnnnnnnnnnnnnnnnnnnnnnnnnnnnnnnnnnnnnnnnnnnnnnnnnnnnnnnnnnnnnnnnnnnnnnnnnnnnnnnnnnnnnnnnnnnnnnnnnnnnnnnnnnnnnnnnnnnnnnnnnnnnnnnnnnnnnnnnnnnnnnnnnnnnnnnnnnnnnnnnnnnnnnnnnnnnnnnnnnnnnnnnnnnnnnnnnnnnnnnnnnnnnnnnnnnnnnnnnnnnnnnnnnnnnnnnnnnnnnnnnnnnnnnnnnnnnnnnnnnnnnnnnnnnnnnnnnnnnnnnnnnnnnnnnnnnnnnnnnnnnnnnnnnnnnnnnnnnnnnnnnnnnnnnnnnnnnnnnnnnnnnnnnnnnnnnnnnnnnnnnnnnnnnnnnnnnnnnnnnnnnnnnnnnnnnnnnnnnnnnnnnnnnnnnnnnnnnnnnnnnnnnnnnnnnnnnnnnnnnnnnnnnnnnnnnnnnnnnnnnnnnnnnnnnnnnnnnnnnnnnnnnnnnnnnnnnnnnnnnnnnnnnnnnnnnnnnnnnnnnnnnnnnnnnnnnnnnnnnnnnnnnnnnnnnnnnnnnnnnnnnnnnnnnnnnnnnnnnnnnnnnnnnnnnnnnnnnnnnnnnnnnnnnnnnnnnnnnnnnnnnnnnnnnnnnnnnnnnnnnnnnnnnnnnnnnnnnnnnnnnnnnnnnnnnnnnnnnnnnnnnnnnnnnnnnnnnnnnnnnnnnnnnnnnnnnnnnnnnnnnnnnnnnnnnnnnnnnnnnnnnnnnnnnnnnnnnnnnnnnnnnnnnnnnnnnnnnnnnnnnnnnnnnnnnnnnnnnnnnnnnnnnnnnnnnnnnnnnnnnnnnnnnnnnnnnnnnnnnnnnnnnnnnnnnnnnnnnnnnnnnnnnnnnnnnnnnnnnnnnnnnnnnnnnnnnnnnnnnnnnnnnnnnnnnnnnnnnnnnnnnnnnnnnnnnnnnnnnnnnnnnnnnnnnnnnnnnnnnnnnnnnnnnnnnnnnnnnnnnnnnnnnnnnnnnnnnnnnnnnnnnnnnnnnnnnnnnnnnnnnnnnnnnnnnnnnnnnnnnnnnnnnnnnnnnnnnnnnnnnnnnnnnnnnnnnnnnnnnnnnnnnnnnnnnnnnnnnnnnnnnnnnnnnnnnnnnnnnnnnnnnnnnnnnnnnnnnnnnnnnnnnnnnnnnnnnnnnnnnnnnnnnnnnnnnnnnnnnnnnnnnnnnnnnnnnnnnnnnnnnnnnnnnnnnnnnnnnnnnnnnnnnnnnnnnnnnnnnnnnnnnnnnnnnnnnnnnnnnnnnnnnnnnnnnnnnnnnnnnnnnnnnnnnnnnnnnnnnnnnnnnnnnnnnnnnnnnnnnnnnnnnnnnnnnnnnnnnnnnnnnnnnnnnnnnnnnnnnnnnnnnnnnnnnnnnnnnnnnnnnnnnnnnnnnnnnnnnnnnnnnnnnnnnnnnnnnnnnnnnnnnnnnnnnnnnnnnnnnnnnnnnnnnnnnnnnnnnnnnnnnnnnnnnnnnnnnnnnnnnnnnnnnnnnnnnnnnnnnnnnnnnnnnnnnnnnnnnnnnnnnnnnnnnnnnnnnnnnnnnnnnnnnnnnnnnnnnnnnnnnnnnnnnnnnnnnnnnnnnnnnnnnnnnnnnnnnnnnnnnnnnnnnnnnnnnnnnnnnnnnnnnnnnnnnnnnnnnnnnnnnnnnnnnnnnnnnnnnnnnnnnnnnnnnnnnnnnnnnnnnnnnnnnnnnnnnnnnnnnnnnnnnnnnnnnnnnnnnnnnnnnnnnnnnnnnnnnnnnnnnnnnnnnnnnnnnnnnnnnnnnnnnnnnnnnnnnnnnnnnnnnnnnnnnnnnnnnnnnnnnnnnnnnnnnnnnnnnnnnnnnnnnnnnnnnnnnnnnnnnnnnnnnnnnnnnnnnnnnnnnnnnnnnnnnnnnnnnnnnnnnnnnnnnnnnnnnnnnnnnnnnnnnnnnnnnnnnnnnnnnnnnnnnnnnnnnnnnnnnnnnnnnnnnnnnnnnnnnnnnnnnnnnnnnnnnnnnnnnnnnnnnnnnnnnnnnnnnnnnnnnnnnnnnnnnnnnnnnnnnnnnnnnnnnnnnnnnnnnnnnnnnnnnnnnnnnnnnnnnnnnnnnnnnnnnnnnnnnnnnnnnnnnnnnnnnnnnnnnnnnnnnnnnnnnnnnnnnnnnnnnnnnnnnnnnnnnnnnnnnnnnnnnnnnnnnnnnnnnnnnnnnnnnnnnnnnnnnnnnnnnnnnnnnnnnnnnnnnnnnnnnnnnnnnnnnnnnnnnnnnnnnnnnnnnnnnnnnnnnnnnnnnnnnnnnnnnnnnnnnnnnnnnnnnnnnnnnnnnnnnnnnnnnnnnnnnnnnnnnnnnnnnnnnnnnnnnnnnnnnnnnnnnnnnnnnnnnnnnnnnnnnnnnnnnnnnnnnnnnnnnnnnnnnnnnnnnnnnnnnnnnnnnnnnnnnnnnnnnnnnnnnnnnnnnnnnnnnnnnnnnnnnnnnnnnnnnnnnnnnnnnnnnnnnnnnnnnnnnnnnnnnnnnnnnnnnnnnnnnnnnnnnnnnnnnnnnnnnnnnnnnnnnnnnnnnnnnnnnnnnnnnnnnnnnnnnnnnnnnnnnnnnnnnnnnnnnnnnnnnnnnnnnnnnnnnnnnnnnnnnnnnnnnnnnnnnnnnnnnnnnnnnnnnnnnnnnnnnnnnnnnnnnnnnnnnnnnnnnnnnnnnnnnnnnnnnnnnnnnnnnnnnnnnnnnnnnnnnnnnnnnnnnnnnnnnnnnnnnnnnnnnnnnnnnnnnnnnnnnnnnnnnnnnnnnnnnnnnnnnnnnnnnnnnnnnnnnnnnnnnnnnnnnnnnnnnnnnnnnnnnnnnnnnnnnnnnnnnnnnnnnnnnnnnnnnnnnnnnnnnnnnnnnnnnnnnnnnnnnnnnnnnnnnnnnnnnnnnnnnnnnnnnnnnnnnnnnnnnnnnnnnnnnnnnnnnnnnnnnnnnnnnnnnnnnnnnnnnnnnnnnnnnnnnnnnnnnnnnnnnnnnnnnnnnnnnnnnnnnnnnnnnnnnnnnnnnnnnnnnnnnnnnnnnnnnnnnnnnnnnnnnnnnnnnnnnnnnnnnnnnnnnnnnnnnnnnnnnnnnnnnnnnnnnnnnnnnnnnnnnnnnnnnnnnnnnnnnnnnnnnnnnnnnnnnnnnnnnnnnnnnnnnnnnnnnnnnnnnnnnnnnnnnnnnnnnnnnnnnnnnnnnnnnnnnnnnnnnnnnnnnnnnnnnnnnnnnnnnnnnnnnnnnnnnnnnnnnnnnnnnnnnnnnnnnnnnnnnnnnnnnnnnnnnnnnnnnnnnnnnnnnnnnnnnnnnnnnnnnnnnnnnnnnnnnnnnnnnnnnnnnnnnnnnnnnnnnnnnnnnnnnnnnnnnnnnnnnnnnnnnnnnnnnnnnnnnnnnnnnnnnnnnnnnnnnnnnnnnnnnnnnnnnnnnnnnnnnnnnnnnnnnnnnnnnnnnnnnnnnnnnnnnnnnnnnnnnnnnnnnnnnnnnnnnnnnnnnnnnnnnnnnnnnnnnnnnnnnnnnnnnnnnnnnnnnnnnnnnnnnnnnnnnnnnnnnnnnnnnnnnnnnnnnnnnnnnnnnnnnnnnnnnnnnnnnnnnnnnnnnnnnnnnnnnnnnnnnnnnnnnnnnnnnnnnnnnnnnnnnnnnnnnnnnnnnnnnnnnnnnnnnnnnnnnnnnnnnnnnnnnnnnnnnnnnnnnnnnnnnnnnnnnnnnnnnnnnnnnnnnnnnnnnnnnnnnnnnnnnnnnnnnnnnnnnnnnnnnnnnnnnnnnnnnnnnnnnnnnnnnnnnnnnnnnnnnnnnnnnnnnnnnnnnnnnnnnnnnnnnnnnnnnnnnnnnnnnnnnnnnnnnnnnnnnnnnnnnnnnnnnnnnnnnnnnnnnnnnnnnnnnnnnnnnnnnnnnnnnnnnnnnnnnnnnnnnnnnnnnnnnnnnnnnnnnnnnnnnnnnnnnnnnnnnnnnnnnnnnnnnnnnnnnnnnnnnnnnnnnnnnnnnnnnnnnnnnnnnnnnnnnnnnnnnnnnnnnnnnnnnnnnnnnnnnnnnnnnnnnnnnnnnnnnnnnnnnnnnnnnnnnnnnnnnnnnnnnnnnnnnnnnnnnnnnnnnnnnnnnnnnnnnnnnnnnnnnnnnnnnnnnnnnnnnnnnnnnnnnnnnnnnnnnnnnnnnnnnnnnnnnnnnnnnnnnnnnnnnnnnnnnnnnnnnnnnnnnnnnnnnnnnnnnnnnnnnnnnnnnnnnnnnnnnnnnnnnnnnnnnnnnnnnnnnnnnnnnnnnnnnnnnnnnnnnnnnnnnnnnnnnnnnnnnnnnnnnnnnnnnnnnnnnnnnnnnnnnnnnnnnnnnnnnnnnnnnnnnnnnnnnnnnnnnnnnnnnnnnnnnnnnnnnnnnnnnnnnnnnnnnnnnnnnnnnnnnnnnnnnnnnnnnnnnnnnnnnnnnnnnnnnnnnnnnnnnnnnnnnnnnnnnnnnnnnnnnnnnnnnnnnnnnnnnnnnnnnnnnnnnnnnnnnnnnnnnnnnnnnnnnnnnnnnnnnnnnnnnnnnnnnnnnnnnnnnnnnnnnnnnnnnnnnnnnnnnnnnnnnnnnnnnnnnnnnnnnnnnnnnnnnnnnnnnnnnnnnnnnnnnnnnnnnnnnnnnnnnnnnnnnnnnnnnnnnnnnnnnnnnnnnnnnnnnnnnnnnnnnnnnnnnnnnnnnnnnnnnnnnnnnnnnnnnnnnnnnnnnnnnnnnnnnnnnnnnnnnnnnnnnnnnnnnnnnnnnnnnnnnnnnnnnnnnnnnnnnnnnnnnnnnnnnnnnnnnnnnnnnnnnnnnnnnnnnnnnnnnnnnnnnnnnnnnnnnnnnnnnnnnnnnnnnnnnnnnnnnnnnnnnnnnnnnnnnnnnnnnnnnnnnnnnnnnnnnnnnnnnnnnnnnnnnnnnnnnnnnnnnnnnnnnnnnnnnnnnnnnnnnnnnnnnnnnnnnnnnnnnnnnnnnnnnnnnnnnnnnnnnnnnnnnnnnnnnnnnnnnnnnnnnnnnnnnnnnnnnnnnnnnnnnnnnnnnnnnnnnnnnnnnnnnnnnnnnnnnnnnnnnnnnnnnnnnnnnnnnnnnnnnnnnnnnnnnnnnnnnnnnnnnnnnnnnnnnnnnnnnnnnnnnnnnnnnnnnnnnnnnnnnnnnnnnnnnnnnnnnnnnnnnnnnnnnnnnnnnnnnnnnnnnnnnnnnnnnnnnnnnnnnnnnnnnnnnnnnnnnnnnnnnnnnnnnnnnnnnnnnnnnnnnnnnnnnnnnnnnnnnnnnnnnnnnnnnnnnnnnnnnnnnnnnnnnnnnnnnnnnnnnnnnnnnnnnnnnnnnnnnnnnnnnnnnnnnnnnnnnnnnnnnnnnnnnnnnnnnnnnnnnnnnnnnnnnnnnnnnnnnnnnnnnnnnnnnnnnnnnnnnnnnnnnnnnnnnnnnnnnnnnnnnnnnnnnnnnnnnnnnnnnnnnnnnnnnnnnnnnnnnnnnnnnnnnnnnnnnnnnnnnnnnnnnnnnnnnnnnnnnnnnnnnnnnnnnnnnnnnnnnnnnnnnnnnnnnnnnnnnnnnnnnnnnnnnnnnnnnnnnnnnnnnnnnnnnnnnnnnnnnnnnnnnnnnnnnnnnnnnnnnnnnnnnnnnnnnnnnnnnnnnnnnnnnnnnnnnnnnnnnnnnnnnnnnnnnnnnnnnnnnnnnnnnnnnnnnnnnnnnnnnnnnnnnnnnnnnnnnnnnnnnnnnnnnnnnnnnnnnnnnnnnnnnnnnnnnnnnnnnnnnnnnnnnnnnnnnnnnnnnnnnnnnnnnnnnnnnnnnnnnnnnnnnnnnnnnnnnnnnnnnnnnnnnnnnnnnnnnnnnnnnnnnnnnnnnnnnnnnnnnnnnnnnnnnnnnnnnnnnnnnnnnnnnnnnnnnnnnnnnnnnnnnnnnnnnnnnnnnnnnnnnnnnnnnnnnnnnnnnnnnnnnnnnnnnnnnnnnnnnnnnnnnnnnnnnnnnnnnnnnnnnnnnnnnnnnnnnnnnnnnnnnnnnnnnnnnnnnnnnnnnnnnnnnnnnnnnnnnnnnnnnnnnnnnnnnnnnnnnnnnnnnnnnnnnnnnnnnnnnnnnnnnnnnnnnnnnnnnnnnnnnnnnnnnnnnnnnnnnnnnnnnnnnnnnnnnnnnnnnnnnnnnnnnnnnnnnnnnnnnnnnnnnnnnnnnnnnnnnnnnnnnnnnnnnnnnnnnnnnnnnnnnnnnnnnnnnnnnnnnnnnnnnnnnnnnnnnnnnnnnnnnnnnnnnnnnnnnnnnnnnnnnnnnnnnnnnnnnnnnnnnnnnnnnnnnnnnnnnnnnnnnnnnnnnnnnnnnnnnnnnnnnnnnnnnnnnnnnnnnnnnnnnnnnnnnnnnnnnnnnnnnnnnnnnnnnnnnnnnnnnnnnnnnnnnnnnnnnnnnnnnnnnnnnnnnnnnnnnnnnnnnnnnnnnnnnnnnnnnnnnnnnnnnnnnnnnnnnnnnnnnnnnnnnnnnnnnnnnnnnnnnnnnnnnnnnnnnnnnnnnnnnnnnnnnnnnnnnnnnnnnnnnnnnnnnnnnnnnnnnnnnnnnnnnnnnnnnnnnnnnnnnnnnnnnnnnnnnnnnnnnnnnnnnnnnnnnnnnnnnnnnnnnnnnnnnnnnnnnnnnnnnnnnnnnnnnnnnnnnnnnnnnnnnnnnnnnnnnnnnnnnnnnnnnnnnnnnnnnnnnnnnnnnnnnnnnnnnnnnnnnnnnnnnnnnnnnnnnnnnnnnnnnnnnnnnnnnnnnnnnnnnnnnnnnnnnnnnnnnnnnnnnnnnnnnnnnnnnnnnnnnnnnnnnnnnnnnnnnnnnnnnnnnnnnnnnnnnnnnnnnnnnnnnnnnnnnnnnnnnnnnnnnnnnnnnnnnnnnnnnnnnnnnnnnnnnnnnnnnnnnnnnnnnnnnnnnnnnnnnnnnnnnnnnnnnnnnnnnnnnnnnnnnnnnnnnnnnnnnnnnnnnnnnnnnnnnnnnnnnnnnnnnnnnnnnnnnnnnnnnnnnnnnnnnnnnnnnnnnnnnnnnnnnnnnnnnnnnnnnnnnnnnnnnnnnnnnnnnnnnnnnnnnnnnnnnnnnnnnnnnnnnnnnnnnnnnnnnnnnnnnnnnnnnnnnnnnnnnnnnnnnnnnnnnnnnnnnnnnnnnnnnnnnnnnnnnnnnnnnnnnnnnnnnnnnnnnnnnnnnnnnnnnnnnnnnnnnnnnnnnnnnnnnnnnnnnnnnnnnnnnnnnnnnnnnnnnnnnnnnnnnnnnnnnnnnnnnnnnnnnnnnnnnnnnnnnnnnnnnnnnnnnnnnnnnnnnnnnnnnnnnnnnnnnnnnnnnnnnnnnnnnnnnnnnnnnnnnnnnnnnnnnnnnnnnnnnnnnnnnnnnnnnnnnnnnnnnnnnnnnnnnnnnnnnnnnnnnnnnnnnnnnnnnnnnnnnnnnnnnnnnnnnnnnnnnnnnnnnnnnnnnnnnnnnnnnnnnnnnnnnnnnnnnnnnnnnnnnnnnnnnnnnnnnnnnnnnnnnnnnnnnnnnnnnnnnnnnnnnnnnnnnnnnnnnnnnnnnnnnnnnnnnnnnnnnnnnnnnnnnnnnnnnnnnnnnnnnnnnnnnnnnnnnnnnnnnnnnnnnnnnnnnnnnnnnnnnnnnnnnnnnnnnnnnnnnnnnnnnnnnnnnnnnnnnnnnnnnnnnnnnnnnnnnnnnnnnnnnnnnnnnnnnnnnnnnnnnnnnnnnnnnnnnnnnnnnnnnnnnnnnnnnnnnnnnnnnnnnnnnnnnnnnnnnnnnnnnnnnnnnnnnnnnnnnnnnnnnnnnnnnnnnnnnnnnnnnnnnnnnnnnnnnnnnnnnnnnnnnnnnnnnnnnnnnnnnnnnnnnnnnnnnnnnnnnnnnnnnnnnnnnnnnnnnnnnnnnnnnnnnnnnnnnnnnnnnnnnnnnnnnnnnnnnnnnnnnnnnnnnnnnnnnnnnnnnnnnnnnnnnnnnnnnnnnnnnnnnnnnnnnnnnnnnnnnnnnnnnnnnnnnnnnnnnnnnnnnnnnnnnnnnnnnnnnnnnnnnnnnnnnnnnnnnnnnnnnnnnnnnnnnnnnnnnnnnnnnnnnnnnnnnnnnnnnnnnnnnnnnnnnnnnnnnnnnnnnnnnnnnnnnnnnnnnnnnnnnnnnnnnnnnnnnnnnnnnnnnnnnnnnnnnnnnnnnnnnnnnnnnnnnnnnnnnnnnnnnnnnnnnnnnnnnnnnnnnnnnnnnnnnnnnnnnnnnnnnnnnnnnnnnnnnnnnnnnnnnnnnnnnnnnnnnnnnnnnnnnnnnnnnnnnnnnnnnnnnnnnnnnnnnnnnnnnnnnnnnnnnnnnnnnnnnnnnnnnnnnnnnnnnnnnnnnnnnnnnnnnnnnnnnnnnnnnnnnnnnnnnnnnnnnnnnnnnnnnnnnnnnnnnnnnnnnnnnnnnnnnnnnnnnnnnnnnnnnnnnnnnnnnnnnnnnnnnnnnnnnnnnnnnnnnnnnnnnnnnnnnnnnnnnnnnnnnnnnnnnnnnnnnnnnnnnnnnnnnnnnnnnnnnnnnnnnnnnnnnnnnnnnnnnnnnnnnnnnnnnnnnnnnnnnnnnnnnnnnnnnnnnnnnnnnnnnnnnnnnnnnnnnnnnnnnnnnnnnnnnnnnnnnnnnnnnnnnnnnnnnnnnnnnnnnnnnnnnnnnnnnnnnnnnnnnnnnnnnnnnnnnnnnnnnnnnnnnnnnnnnnnnnnnnnnnnnnnnnnnnnnnnnnnnnnnnnnnnnnnnnnnnnnnnnnnnnnnnnnnnnnnnnnnnnnnnnnnnnnnnnnnnnnnnnnnnnnnnnnnnnnnnnnnnnnnnnnnnnnnnnnnnnnnnnnnnnnnnnnnnnnnnnnnnnnnnnnnnnnnnnnnnnnnnnnnnnnnnnnnnnnnnnnnnnnnnnnnnnnnnnnnnnnnnnnnnnnnnnnnnnnnnnnnnnnnnnnnnnnnnnnnnnnnnnnnnnnnnnnnnnnnnnnnnnnnnnnnnnnnnnnnnnnnnnnnnnnnnnnnnnnnnnnnnnnnnnnnnnnnnnnnnnnnnnnnnnnnnnnnnnnnnnnnnnnnnnnnnnnnnnnnnnnnnnnnnnnnnnnnnnnnnnnnnnnnnnnnnnnnnnnnnnnnnnnnnnnnnnnnnnnnnnnnnnnnnnnnnnnnnnnnnnnnnnnnnnnnnnnnnnnnnnnnnnnnnnnnnnnnnnnnnnnnnnnnnnnnnnnnnnnnnnnnnnnnnnnnnnnnnnnnnnnnnnnnnnnnnnnnnnnnnnnnnnnnnnnnnnnnnnnnnnnnnnnnnnnnnnnnnnnnnnnnnnnnnnnnnnnnnnnnnnnnnnnnnnnnnnnnnnnnnnnnnnnnnnnnnnnnnnnnnnnnnnnnnnnnnnnnnnnnnnnnnnnnnnnnnnnnnnnnnnnnnnnnnnnnnnnnnnnnnnnnnnnnnnnnnnnnnnnnnnnnnnnnnnnnnnnnnnnnnnnnnnnnnnnnnnnnnnnnnnnnnnnnnnnnnnnnnnnnnnnnnnnnnnnnnnnnnnnnnnnnnnnnnnnnnnnnnnnnnnnnnnnnnnnnnnnnnnnnnnnnnnnnnnnnnnnnnnnnnnnnnnnnnnnnnnnnnnnnnnnnnnnnnnnnnnnnnnnnnnnnnnnnnnnnnnnnnnnnnnnnnnnnnnnnnnnnnnnnnnnnnnnnnnnnnnnnnnnnnnnnnnnnnnnnnnnnnnnnnnnnnnnnnnnnnnnnnnnnnnnnnnnnnnnnnnnnnnnnnnnnnnnnnnnnnnnnnnnnnnnnnnnnnnnnnnnnnnnnnnnnnnnnnnnnnnnnnnnnnnnnnnnnnnnnnnnnnnnnnnnnnnnnnnnnnnnnnnnnnnnnnnnnnnnnnnnnnnnnnnnnnnnnnnnnnnnnnnnnnnnnnnnnnnnnnnnnnnnnnnnnnnnnnnnnnnnnnnnnnnnnnnnnnnnnnnnnnnnnnnnnnnnnnnnnnnnnnnnnnnnnnnnnnnnnnnnnnnnnnnnnnnnnnnnnnnnnnnnnnnnnnnnnnnnnnnnnnnnnnnnnnnnnnnnnnnnnnnnnnnnnnnnnnnnnnnnnnnnnnnnnnnnnnnnnnnnnnnnnnnnnnnnnnnnnnnnnnnnnnnnnnnnnnnnnnnnnnnnnnnnnnnnnnnnnnnnnnnnnnnnnnnnnnnnnnnnnnnnnnnnnnnnnnnnnnnnnnnnnnnnnnnnnnnnnnnnnnnnnnnnnnnnnnnnnnnnnnnnnnnnnnnnnnnnnnnnnnnnnnnnnnnnnnnnnnnnnnnnnnnnnnnnnnnnnnnnnnnnnnnnnnnnnnnnnnnnnnnnnnnnnnnnnnnnnnnnnnnnnnnnnnnnnnnnnnnnnnnnnnnnnnnnnnnnnnnnnnnnnnnnnnnnnnnnnnnnnnnnnnnnnnnnnnnnnnnnnnnnnnnnnnnnnnnnnnnnnnnnnnnnnnnnnnnnnnnnnnnnnnnnnnnnnnnnnnnnnnnnnnnnnnnnnnnnnnnnnnnnnnnnnnnnnnnnnnnnnnnnnnnnnnnnnnnnnnnnnnnnnnnnnnnnnnnnnnnnnnnnnnnnnnnnnnnnnnnnnnnnnnnnnnnnnnnnnnnnnnnnnnnnnnnnnnnnnnnnnnnnnnnnnnnnnnnnnnnnnnnnnnnnnnnnnnnnnnnnnnnnnnnnnnnnnnnnnnnnnnnnnnnnnnnnnnnnnnnnnnnnnnnnnnnnnnnnnnnnnnnnnnnnnnnnnnnnnnnnnnnnnnnnnnnnnnnnnnnnnnnnnnnnnnnnnnnnnnnnnnnnnnnnnnnnnnnnnnnnnnnnnnnnnnnnnnnnnnnnnnnnnnnnnnnnnnnnnnnnnnnnnnnnnnnnnnnnnnnnnnnnnnnnnnnnnnnnnnnnnnnnnnnnnnnnnnnnnnnnnnnnnnnnnnnnnnnnnnnnnnnnnnnnnnnnnnnnnnnnnnnnnnnnnnnnnnnnnnnnnnnnnnnnnnnnnnnnnnnnnnnnnnnnnnnnnnnnnnnnnnnnnnnnnnnnnnnnnnnnnnnnnnnnnnnnnnnnnnnnnnnnnnnnnnnnnnnnnnnnnnnnnnnnnnnnnnnnnnnnnnnnnnnnnnnnnnnnnnnnnnnnnnnnnnnnnnnnnnnnnnnnnnnnnnnnnnnnnnnnnnnnnnnnnnnnnnnnnnnnnnnnnnnnnnnnnnnnnnnnnnnnnnnnnnnnnnnnnnnnnnnnnnnnnnnnnnnnnnnnnnnnnnnnnnnnnnnnnnnnnnnnnnnnnnnnnnnnnnnnnnnnnnnnnnnnnnnnnnnnnnnnnnnnnnnnnnnnnnnnnnnnnnnnnnnnnnnnnnnnnnnnnnnnnnnnnnnnnnnnnnnnnnnnnnnnnnnnnnnnnnnnnnnnnnnnnnnnnnnnnnnnnnnnnnnnnnnnnnnnnnnnnnnnnnnnnnnnnnnnnnnnnnnnnnnnnnnnnnnnnnnnnnnnnnnnnnnnnnnnnnnnnnnnnnnnnnnnnnnnnnnnnnnnnnnnnnnnnnnnnnnnnnnnnnnnnnnnnnnnnnnnnnnnnnnnnnnnnnnnnnnnnnnnnnnnnnnnnnnnnnnnnnnnnnnnnnnnnnnnnnnnnnnnnnnnnnnnnnnnnnnnnnnnnnnnnnnnnnnnnnnnnnnnnnnnnnnnnnnnnnnnnnnnnnnnnnnnnnnnnnnnnnnnnnnnnnnnnnnnnnnnnnnnnnnnnnnnnnnnnnnnnnnnnnnnnnnnnnnnnnnnnnnnnnnnnnnnnnnnnnnnnnnnnnnnnnnnnnnnnnnnnnnnnnnnnnnnnnnnnnnnnnnnnnnnnnnnnnnnnnnnnnnnnnnnnnnnnnnnnnnnnnnnnnnnnnnnnnnnnnnnnnnnnnnnnnnnnnnnnnnnnnnnnnnnnnnnnnnnnnnnnnnnnnnnnnnnnnnnnnnnnnnnnnnnnnnnnnnnnnnnnnnnnnnnnnnnnnnnnnnnnnnnnnnnnnnnnnnnnnnnnnnnnnnnnnnnnnnnnnnnnnnnnnnnnnnnnnnnnnnnnnnnnnnnnnnnnnnnnnnnnnnnnnnnnnnnnnnnnnnnnnnnnnnnnnnnnnnnnnnnnnnnnnnnnnnnnnnnnnnnnnnnnnnnnnnnnnnnnnnnnnnnnnnnnnnnnnnnnnnnnnnnnnnnnnnnnnnnnnnnnnnnnnnnnnnnnnnnnnnnnnnnnnnnnnnnnnnnnnnnnnnnnnnnnnnnnnnnnnnnnnnnnnnnnnnnnnnnnnnnnnnnnnnnnnnnnnnnnnnnnnnnnnnnnnnnnnnnnnnnnnnnnnnnnnnnnnnnnnnnnnnnnnnnnnnnnnnnnnnnnnnnnnnnnnnnnnnnnnnnnnnnnnnnnnnnnnnnnnnnnnnnnnnnnnnnnnnnnnnnnnnnnnnnnnnnnnnnnnnnnnnnnnnnnnnnnnnnnnnnnnnnnnnnnnnnnnnnnnnnnnnnnnnnnnnnnnnnnnnnnnnnnnnnnnnnnnnnnnnnnnnnnnnnnnnnnnnnnnnnnnnnnnnnnnnnnnnnnnnnnnnnnnnnnnnnnnnnnnnnnnnnnnnnnnnnnnnnnnnnnnnnnnnnnnnnnnnnnnnnnnnnnnnnnnnnnnnnnnnnnnnnnnnnnnnnnnnnnnnnnnnnnnnnnnnnnnnnnnnnnnnnnnnnnnnnnnnnnnnnnnnnnnnnnnnnnnnnnnnnnnnnnnnnnnnnnnnnnnnnnnnnnnnnnnnnnnnnnnnnnnnnnnnnnnnnnnnnnnnnnnnnnnnnnnnnnnnnnnnnnnnnnnnnnnnnnnnnnnnnnnnnnnnnnnnnnnnnnnnnnnnnnnnnnnnnnnnnnnnnnnnnnnnnnnnnnnnnnnnnnnnnnnnnnnnnnnnnnnnnnnnnnnnnnnnnnnnnnnnnnnnnnnnnnnnnnnnnnnnnnnnnnnnnnnnnnnnnnnnnnnnnnnnnnnnnnnnnnnnnnnnnnnnnnnnnnnnnnnnnnnnnnnnnnnnnnnnnnnnnnnnnnnnnnnnnnnnnnnnnnnnnnnnnnnnnnnnnnnnnnnnnnnnnnnnnnnnnnnnnnnnnnnnnnnnnnnnnnnnnnnnnnnnnnnnnnnnnnnnnnnnnnnnnnnnnnnnnnnnnnnnnnnnnnnnnnnnnnnnnnnnnnnnnnnnnnnnnnnnnnnnnnnnnnnnnnnnnnnnnnnnnnnnnnnnnnnnnnnnnnnnnnnnnnnnnnnnnnnnnnnnnnnnnnnnnnnnnnnnnnnnnnnnnnnnnnnnnnnnnnnnnnnnnnnnnnnnnnnnnnnnnnnnnnnnnnnnnnnnnnnnnnnnnnnnnnnnnnnnnnnnnnnnnnnnnnnnnnnnnnnnnnnnnnnnnnnnnnnnnnnnnnnnnnnnnnnnnnnnnnnnnnnnnnnnnnnnnnnnnnnnnnnnnnnnnnnnnnnnnnnnnnnnnnnnnnnnnnnnnnnnnnnnnnnnnnnnnnnnnnnnnnnnnnnnnnnnnnnnnnnnnnnnnnnnnnnnnnnnnnnnnnnnnnnnnnnnnnnnnnnnnnnnnnnnnnnnnnnnnnnnnnnnnnnnnnnnnnnnnnnnnnnnnnnnnnnnnnnnnnnnnnnnnnnnnnnnnnnnnnnnnnnnnnnnnnnnnnnnnnnnnnnnnnnnnnnnnnnnnnnnnnnnnnnnnnnnnnnnnnnnnnnnnnnnnnnnnnnnnnnnnnnnnnnnnnnnnnnnnnnnnnnnnnnnnnnnnnnnnnnnnnnnnnnnnnnnnnnnnnnnnnnnnnnnnnnnnnnnnnnnnnnnnnnnnnnnnnnnnnnnnnnnnnnnnnnnnnnnnnnnnnnnnnnnnnnnnnnnnnnnnnnnnnnnnnnnnnnnnnnnnnnnnnnnnnnnnnnnnnnnnnnnnnnnnnnnnnnnnnnnnnnnnnnnnnnnnnnnnnnnnnnnnnnnnnnnnnnnnnnnnnnnnnnnnnnnnnnnnnnnnnnnnnnnnnnnnnnnnnnnnnnnnnnnnnnnnnnnnnnnnnnnnnnnnnnnnnnnnnnnnnnnnnnnnnnnnnnnnnnnnnnnnnnnnnnnnnnnnnnnnnnnnnnnnnnnnnnnnnnnnnnnnnnnnnnnnnnnnnnnnnnnnnnnnnnnnnnnnnnnnnnnnnnnnnnnnnnnnnnnnnnnnnnnnnnnnnnnnnnnnnnnnnnnnnnnnnnnnnnnnnnnnnnnnnnnnnnnnnnnnnnnnnnnnnnnnnnnnnnnnnnnnnnnnnnnnnnnnnnnnnnnnnnnnnnnnnnnnnnnnnnnnnnnnnnnnnnnnnnnnnnnnnnnnnnnnnnnnnnnnnnnnnnnnnnnnnnnnnnnnnnnnnnnnnnnnnnnnnnnnnnnnnnnnnnnnnnnnnnnnnnnnnnnnnnnnnnnnnnnnnnnnnnnnnnnnnnnnnnnnnnnnnnnnnnnnnnnnnnnnnnnnnnnnnnnnnnnnnnnnnnnnnnnnnnnnnnnnnnnnnnnnnnnnnnnnnnnnnnnnnnnnnnnnnnnnnnnnnnnnnnnnnnnnnnnnnnnnnnnnnnnnnnnnnnnnnnnnnnnnnnnnnnnnnnnnnnnnnnnnnnnnnnnnnnnnnnnnnnnnnnnnnnnnnnnnnnnnnnnnnnnnnnnnnnnnnnnnnnnnnnnnnnnnnnnnnnnnnnnnnnnnnnnnnnnnnnnnnnnnnnnnnnnnnnnnnnnnnnnnnnnnnnnnnnnnnnnnnnnnnnnnnnnnnnnnnnnnnnnnnnnnnnnnnnnnnnnnnnnnnnnnnnnnnnnnnnnnnnnnnnnnnnnnnnnnnnnnnnnnnnnnnnnnnnnnnnnnnnnnnnnnnnnnnnnnnnnnnnnnnnnnnnnnnnnnnnnnnnnnnnnnnnnnnnnnnnnnnnnnnnnnnnnnnnnnnnnnnnnnnnnnnnnnnnnnnnnnnnnnnnnnnnnnnnnnnnnnnnnnnnnnnnnnnnnnnnnnnnnnnnnnnnnnnnnnnnnnnnnnnnnnnnnnnnnnnnnnnnnnnnnnnnnnnnnnnnnnnnnnnnnnnnnnnnnnnnnnnnnnnnnnnnnnnnnnnnnnnnnnnnnnnnnnnnnnnnnnnnnnnnnnnnnnnnnnnnnnnnnnnnnnnnnnnnnnnnnnnnnnnnnnnnnnnnnnnnnnnnnnnnnnnnnnnnnnnnnnnnnnnnnnnnnnnnnnnnnnnnnnnnnnnnnnnnnnnnnnnnnnnnnnnnnnnnnnnnnnnnnnnnnnnnnnnnnnnnnnnnnnnnnnnnnnnnnnnnnnnnnnnnnnnnnnnnnnnnnnnnnnnnnnnnnnnnnnnnnnnnnnnnnnnnnnnnnnnnnnnnnnnnnnnnnnnnnnnnnnnnnnnnnnnnnnnnnnnnnnnnnnnnnnnnnnnnnnnnnnnnnnnnnnnnnnnnnnnnnnnnnnnnnnnnnnnnnnnnnnnnnnnnnnnnnnnnnnnnnnnnnnnnnnnnnnnnnnnnnnnnnnnnnnnnnnnnnnnnnnnnnnnnnnnnnnnnnnnnnnnnnnnnnnnnnnnnnnnnnnnnnnnnnnnnnnnnnnnnnnnnnnnnnnnnnnnnnnnnnnnnnnnnnnnnnnnnnnnnnnnnnnnnnnnnnnnnnnnnnnnnnnnnnnnnnnnnnnnnnnnnnnnnnnnnnnnnnnnnnnnnnnnnnnnnnnnnnnnnnnnnnnnnnnnnnnnnnnnnnnnnnnnnnnnnnnnnnnnnnnnnnnnnnnnnnnnnnnnnnnnnnnnnnnnnnnnnnnnnnnnnnnnnnnnnnnnnnnnnnnnnnnnnnnnnnnnnnnnnnnnnnnnnnnnnnnnnnnnnnnnnnnnnnnnnnnnnnnnnnnnnnnnnnnnnnnnnnnnnnnnnnnnnnnnnnnnnnnnnnnnnnnnnnnnnnnnnnnnnnnnnnnnnnnnnnnnnnnnnnnnnnnnnnnnnnnnnnnnnnnnnnnnnnnnnnnnnnnnnnnnnnnnnnnnnnnnnnnnnnnnnnnnnnnnnnnnnnnnnnnnnnnnnnnnnnnnnnnnnnnnnnnnnnnnnnnnnnnnnnnnnnnnnnnnnnnnnnnnnnnnnnnnnnnnnnnnnnnnnnnnnnnnnnnnnnnnnnnnnnnnnnnnnnnnnnnnnnnnnnnnnnnnnnnnnnnnnnnnnnnnnnnnnnnnnnnnnnnnnnnnnnnnnnnnnnnnnnnnnnnnnnnnnnnnnnnnnnnnnnnnnnnnnnnnnnnnnnnnnnnnnnnnnnnnnnnnnnnnnnnnnnnnnnnnnnnnnnnnnnnnnnnnnnnnnnnnnnnnnnnnnnnnnnnnnnnnnnnnnnnnnnnnnnnnnnnnnnnnnnnnnnnnnnnnnnnnnnnnnnnnnnnnnnnnnnnnnnnnnnnnnnnnnnnnnnnnnnnnnnnnnnnnnnnnnnnnnnnnnnnnnnnnnnnnnnnnnnnnnnnnnnnnnnnnnnnnnnnnnnnnnnnnnnnnnnnnnnnnnnnnnnnnnnnnnnnnnnnnnnnnnnnnnnnnnnnnnnnnnnnnnnnnnnnnnnnnnnnnnnnnnnnnnnnnnnnnnnnnnnnnnnnnnnnnnnnnnnnnnnnnnnnnnnnnnnnnnnnnnnnnnnnnnnnnnnnnnnnnnnnnnnnnnnnnnnnnnnnnnnnnnnnnnnnnnnnnnnnnnnnnnnnnnnnnnnnnnnnnnnnnnnnnnnnnnnnnnnnnnnnnnnnnnnnnnnnnnnnnnnnnnnnnnnnnnnnnnnnnnnnnnnnnnnnnnnnnnnnnnnnnnnnnnnnnnnnnnnnnnnnnnnnnnnnnnnnnnnnnnnnnnnnnnnnnnnnnnnnnnnnnnnnnnnnnnnnnnnnnnnnnnnnnnnnnnnnnnnnnnnnnnnnnnnnnnnnnnnnnnnnnnnnnnnnnnnnnnnnnnnnnnnnnnnnnnnnnnnnnnnnnnnnnnnnnnnnnnnnnnnnnnnnnnnnnnnnnnnnnnnnnnnnnnnnnnnnnnnnnnnnnnnnnnnnnnnnnnnnnnnnnnnnnnnnnnnnnnnnnnnnnnnnnnnnnnnnnnnnnnnnnnnnnnnnnnnnnnnnnnnnnnnnnnnnnnnnnnnnnnnnnnnnnnnnnnnnnnnnnnnnnnnnnnnnnnnnnnnnnnnnnnnnnnnnnnnnnnnnnnnnnnnnnnnnnnnnnnnnnnnnnnnnnnnnnnnnnnnnnnnnnnnnnnnnnnnnnnnnnnnnnnnnnnnnnnnnnnnnnnnnnnnnnnnnnnnnnnnnnnnnnnnnnnnnnnnnnnnnnnnnnnnnnnnnnnnnnnnnnnnnnnnnnnnnnnnnnnnnnnnnnnnnnnnnnnnnnnnnnnnnnnnnnnnnnnnnnnnnnnnnnnnnnnnnnnnnnnnnnnnnnnnnnnnnnnnnnnnnnnnnnnnnnnnnnnnnnnnnnnnnnnnnnnnnnnnnnnnnnnnnnnnnnnnnnnnnnnnnnnnnnnnnnnnnnnnnnnnnnnnnnnnnnnnnnnnnnnnnnnnnnnnnnnnnnnnnnnnnnnnnnnnnnnnnnnnnnnnnnnnnnnnnnnnnnnnnnnnnnnnnnnnnnnnnnnnnnnnnnnnnnnnnnnnnnnnnnnnnnnnnnnnnnnnnnnnnnnnnnnnnnnnnnnnnnnnnnnnnnnnnnnnnnnnnnnnnnnnnnnnnnnnnnnnnnnnnnnnnnnnnnnnnnnnnnnnnnnnnnnnnnnnnnnnnnnnnnnnnnnnnnnnnnnnnnnnnnnnnnnnnnnnnnnnnnnnnnnnnnnnnnnnnnnnnnnnnnnnnnnnnnnnnnnnnnnnnnnnnnnnnnnnnnnnnnnnnnnnnnnnnnnnnnnnnnnnnnnnnnnnnnnnnnnnnnnnnnnnnnnnnnnnnnnnnnnnnnnnnnnnnnnnnnnnnnnnnnnnnnnnnnnnnnnnnnnnnnnnnnnnnnnnnnnnnnnnnnnnnnnnnnnnnnnnnnnnnnnnnnnnnnnnnnnnnnnnnnnnnnnnnnnnnnnnnnnnnnnnnnnnnnnnnnnnnnnnnnnnnnnnnnnnnnnnnnnnnnnnnnnnnnnnnnnnnnnnnnnnnnnnnnnnnnnnnnnnnnnnnnnnnnnnnnnnnnnnnnnnnnnnnnnnnnnnnnnnnnnnnnnnnnnnnnnnnnnnnnnnnnnnnnnnnnnnnnnnnnnnnnnnnnnnnnnnnnnnnnnnnnnnnnnnnnnnnnnnnnnnnnnnnnnnnnnnnnnnnnnnnnnnnnnnnnnnnnnnnnnnnnnnnnnnnnnnnnnnnnnnnnnnnnnnnnnnnnnnnnnnnnnnnnnnnnnnnnnnnnnnnnnnnnnnnnnnnnnnnnnnnnnnnnnnnnnnnnnnnnnnnnnnnnnnnnnnnnnnnnnnnnnnnnnnnnnnnnnnnnnnnnnnnnnnnnnnnnnnnnnnnnnnnnnnnnnnnnnnnnnnnnnnnnnnnnnnnnnnnnnnnnnnnnnnnnnnnnnnnnnnnnnnnnnnnnnnnnnnnnnnnnnnnnnnnnnnnnnnnnnnnnnnnnnnnnnnnnnnnnnnnnnnnnnnnnnnnnnnnnnnnnnnnnnnnnnnnnnnnnnnnnnnnnnnnnnnnnnnnnnnnnnnnnnnnnnnnnnnnnnnnnnnnnnnnnnnnnnnnnnnnnnnnnnnnnnnnnnnnnnnnnnnnnnnnnnnnnnnnnnnnnnnnnnnnnnnnnnnnnnnnnnnnnnnnnnnnnnnnnnnnnnnnnnnnnnnnnnnnnnnnnnnnnnnnnnnnnnnnnnnnnnnnnnnnnnnnnnnnnnnnnnnnnnnnnnnnnnnnnnnnnnnnnnnnnnnnnnnnnnnnnnnnnnnnnnnnnnnnnnnnnnnnnnnnnnnnnnnnnnnnnnnnnnnnnnnnnnnnnnnnnnnnnnnnnnnnnnnnnnnnnnnnnnnnnnnnnnnnnnnnnnnnnnnnnnnnnnnnnnnnnnnnnnnnnnnnnnnnnnnnnnnnnnnnnnnnnnnnnnnnnnnnnnnnnnnnnnnnnnnnnnnnnnnnnnnnnnnnnnnnnnnnnnnnnnnnnnnnnnnnnnnnnnnnnnnnnnnnnnnnnnnnnnnnnnnnnnnnnnnnnnnnnnnnnnnnnnnnnnnnnnnnnnnnnnnnnnnnnnnnnnnnnnnnnnnnnnnnnnnnnnnnnnnnnnnnnnnnnnnnnnnnnnnnnnnnnnnnnnnnnnnnnnnnnnnnnnnnnnnnnnnnnnnnnnnnnnnnnnnnnnnnnnnnnnnnnnnnnnnnnnnnnnnnnnnnnnnnnnnnnnnnnnnnnnnnnnnnnnnnnnnnnnnnnnnnnnnnnnnnnnnnnnnnnnnnnnnnnnnnnnnnnnnnnnnnnnnnnnnnnnnnnnnnnnnnnnnnnnnnnnnnnnnnnnnnnnnnnnnnnnnnnnnnnnnnnnnnnnnnnnnnnnnnnnnnnnnnnnnnnnnnnnnnnnnnnnnnnnnnnnnnnnnnnnnnnnnnnnnnnnnnnnnnnnnnnnnnnnnnnnnnnnnnnnnnnnnnnnnnnnnnnnnnnnnnnnnnnnnnnnnnnnnnnnnnnnnnnnnnnnnnnnnnnnnnnnnnnnnnnnnnnnnnnnnnnnnnnnnnnnnnnnnnnnnnnnnnnnnnnnnnnnnnnnnnnnnnnnnnnnnnnnnnnnnnnnnnnnnnnnnnnnnnnnnnnnnnnnnnnnnnnnnnnnnnnnnnnnnnnnnnnnnnnnnnnnnnnnnnnnnnnnnnnnnnnnnnnnnnnnnnnnnnnnnnnnnnnnnnnnnnnnnnnnnnnnnnnnnnnnnnnnnnnnnnnnnnnnnnnnnnnnnnnnnnnnnnnnnnnnnnnnnnnnnnnnnnnnnnnnnnnnnnnnnnnnnnnnnnnnnnnnnnnnnnnnnnnnnnnnnnnnnnnnnnnnnnnnnnnnnnnnnnnnnnnnnnnnnnnnnnnnnnnnnnnnnnnnnnnnnnnnnnnnnnnnnnnnnnnnnnnnnnnnnnnnnnnnnnnnnnnnnnnnnnnnnnnnnnnnnnnnnnnnnnnnnnnnnnnnnnnnnnnnnnnnnnnnnnnnnnnnnnnnnnnnnnnnnnnnnnnnnnnnnnnnnnnnnnnnnnnnnnnnnnnnnnnnnnnnnnnnnnnnnnnnnnnnnnnnnnnnnnnnnnnnnnnnnnnnnnnnnnnnnnnnnnnnnnnnnnnnnnnnnnnnnnnnnnnnnnnnnnnnnnnnnnnnnnnnnnnnnnnnnnnnnnnnnnnnnnnnnnnnnnnnnnnnnnnnnnnnnnnnnnnnnnnnnnnnnnnnnnnnnnnnnnnnnnnnnnnnnnnnnnnnnnnnnnnnnnnnnnnnnnnnnnnnnnnnnnnnnnnnnnnnnnnnnnnnnnnnnnnnnnnnnnnnnnnnnnnnnnnnnnnnnnnnnnnnnnnnnnnnnnnnnnnnnnnnnnnnnnnnnnnnnnnnnnnnnnnnnnnnnnnnnnnnnnnnnnnnnnnnnnnnnnnnnnnnnnnnnnnnnnnnnnnnnnnnnnnnnnnnnnnnnnnnnnnnnnnnnnnnnnnnnnnnnnnnnnnnnnnnnnnnnnnnnnnnnnnnnnnnnnnnnnnnnnnnnnnnnnnnnnnnnnnnnnnnnnnnnnnnnnnnnnnnnnnnnnnnnnnnnnnnnnnnnnnnnnnnnnnnnnnnnnnnnnnnnnnnnnnnnnnnnnnnnnnnnnnnnnnnnnnnnnnnnnnnnnnnnnnnnnnnnnnnnnnnnnnnnnnnnnnnnnnnnnnnnnnnnnnnnnnnnnnnnnnnnnnnnnnnnnnnnnnnnnnnnnnnnnnnnnnnnnnnnnnnnnnnnnnnnnnnnnnnnnnnnnnnnnnnnnnnnnnnnnnnnnnnnnnnnnnnnnnnnnnnnnnnnnnnnnnnnnnnnnnnnnnnnnnnnnnnnnnnnnnnnnnnnnnnnnnnnnnnnnnnnnnnnnnnnnnnnnnnnnnnnnnnnnnnnnnnnnnnnnnnnnnnnnnnnnnnnnnnnnnnnnnnnnnnnnnnnnnnnnnnnnnnnnnnnnnnnnnnnnnnnnnnnnnnnnnnnnnnnnnnnnnnnnnnnnnnnnnnnnnnnnnnnnnnnnnnnnnnnnnnnnnnnnnnnnnnnnnnnnnnnnnnnnnnnnnnnnnnnnnnnnnnnnnnnnnnnnnnnnnnnnnnnnnnnnnnnnnnnnnnnnnnnnnnnnnnnnnnnnnnnnnnnnnnnnnnnnnnnnnnnnnnnnnnnnnnnnnnnnnnnnnnnnnnnnnnnnnnnnnnnnnnnnnnnnnnnnnnnnnnnnnnnnnnnnnnnnnnnnnnnnnnnnnnnnnnnnnnnnnnnnnnnnnnnnnnnnnnnnnnnnnnnnnnnnnnnnnnnnnnnnnnnnnnnnnnnnnnnnnnnnnnnnnnnnnnnnnnnnnnnnnnnnnnnnnnnnnnnnnnnnnnnnnnnnnnnnnnnnnnnnnnnnnnnnnnnnnnnnnnnnnnnnnnnnnnnnnnnnnnnnnnnnnnnnnnnnnnnnnnnnnnnnnnnnnnnnnnnnnnnnnnnnnnnnnnnnnnnnnnnnnnnnnnnnnnnnnnnnnnnnnnnnnnnnnnnnnnnnnnnnnnnnnnnnnnnnnnnnnnnnnnnnnnnnnnnnnnnnnnnnnnnnnnnnnnnnnnnnnnnnnnnnnnnnnnnnnnnnnnnnnnnnnnnnnnnnnnnnnnnnnnnnnnnnnnnnnnnnnnnnnnnnnnnnnnnnnnnnnnnnnnnnnnnnnnnnnnnnnnnnnnnnnnnnnnnnnnnnnnnnnnnnnnnnnnnnnnnnnnnnnnnnnnnnnnnnnnnnnnnnnnnnnnnnnnnnnnnnnnnnnnnnnnnnnnnnnnnnnnnnnnnnnnnnnnnnnnnnnnnnnnnnnnnnnnnnnnnnnnnnnnnnnnnnnnnnnnnnnnnnnnnnnnnnnnnnnnnnnnnnnnnnnnnnnnnnnnnnnnnnnnnnnnnnnnnnnnnnnnnnnnnnnnnnnnnnnnnnnnnnnnnnnnnnnnnnnnnnnnnnnnnnnnnnnnnnnnnnnnnnnnnnnnnnnnnnnnnnnnnnnnnnnnnnnnnnnnnnnnnnnnnnnnnnnnnnnnnnnnnnnnnnnnnnnnnnnnnnnnnnnnnnnnnnnnnnnnnnnnnnnnnnnnnnnnnnnnnnnnnnnnnnnnnnnnnnnnnnnnnnnnnnnnnnnnnnnnnnnnnnnnnnnnnnnnnnnnnnnnnnnnnnnnnnnnnnnnnnnnnnnnnnnnnnnnnnnnnnnnnnnnnnnnnnnnnnnnnnnnnnnnnnnnnnnnnnnnnnnnnnnnnnnnnnnnnnnnnnnnnnnnnnnnnnnnnnnnnnnnnnnnnnnnnnnnnnnnnnnnnnnnnnnnnnnnnnnnnnnnnnnnnnnnnnnnnnnnnnnnnnnnnnnnnnnnnnnnnnnnnnnnnnnnnnnnnnnnnnnnnnnnnnnnnnnnnnnnnnnnnnnnnnnnnnnnnnnnnnnnnnnnnnnnnnnnnnnnnnnnnnnnnnnnnnnnnnnnnnnnnnnnnnnnnnnnnnnnnnnnnnnnnnnnnnnnnnnnnnnnnnnnnnnnnnnnnnnnnnnnnnnnnnnnnnnnnnnnnnnnnnnnnnnnnnnnnnnnnnnnnnnnnnnnnnnnnnnnnnnnnnnnnnnnnnnnnnnnnnnnnnnnnnnnnnnnnnnnnnnnnnnnnnnnnnnnnnnnnnnnnnnnnnnnnnnnnnnnnnnnnnnnnnnnnnnnnnnnnnnnnnnnnnnnnnnnnnnnnnnnnnnnnnnnnnnnnnnnnnnnnnnnnnnnnnnnnnnnnnnnnnnnnnnnnnnnnnnnnnnnnnnnnnnnnnnnnnnnnnnnnnnnnnnnnnnnnnnnnnnnnnnnnnnnnnnnnnnnnnnnnnnnnnnnnnnnnnnnnnnnnnnnnnnnnnnnnnnnnnnnnnnnnnnnnnnnnnnnnnnnnnnnnnnnnnnnnnnnnnnnnnnnnnnnnnnnnnnnnnnnnnnnnnnnnnnnnnnnnnnnnnnnnnnnnnnnnnnnnnnnnnnnnnnnnnnnnnnnnnnnnnnnnnnnnnnnnnnnnnnnnnnnnnnnnnnnnnnnnnnnnnnnnnnnnnnnnnnnnnnnnnnnnnnnnnnnnnnnnnnnnnnnnnnnnnnnnnnnnnnnnnnnnnnnnnnnnnnnnnnnnnnnnnnnnnnnnnnnnnnnnnnnnnnnnnnnnnnnnnnnnnnnnnnnnnnnnnnnnnnnnnnnnnnnnnnnnnnnnnnnnnnnnnnnnnnnnnnnnnnnnnnnnnnnnnnnnnnnnnnnnnnnnnnnnnnnnnnnnnnnnnnnnnnnnnnnnnnnnnnnnnnnnnnnnnnnnnnnnnnnnnnnnnnnnnnnnnnnnnnnnnnnnnnnnnnnnnnnnnnnnnnnnnnnnnnnnnnnnnnnnnnnnnnnnnnnnnnnnnnnnnnnnnnnnnnnnnnnnnnnnnnnnnnnnnnnnnnnnnnnnnnnnnnnnnnnnnnnnnnnnnnnnnnnnnnnnnnnnnnnnnnnnnnnnnnnnnnnnnnnnnnnnnnnnnnnnnnnnnnnnnnnnnnnnnnnnnnnnnnnnnnnnnnnnnnnnnnnnnnnnnnnnnnnnnnnnnnnnnnnnnnnnnnnnnnnnnnnnnnnnnnnnnnnnnnnnnnnnnnnnnnnnnnnnnnnnnnnnnnnnnnnnnnnnnnnnnnnnnnnnnnnnnnnnnnnnnnnnnnnnnnnnnnnnnnnnnnnnnnnnnnnnnnnnnnnnnnnnnnnnnnnnnnnnnnnnnnnnnnnnnnnnnnnnnnnnnnnnnnnnnnnnnnnnnnnnnnnnnnnnnnnnnnnnnnnnnnnnnnnnnnnnnnnnnnnnnnnnnnnnnnnnnnnnnnnnnnnnnnnnnnnnnnnnnnnnnnnnnnnnnnnnnnnnnnnnnnnnnnnnnnnnnnnnnnnnnnnnnnnnnnnnnnnnnnnnnnnnnnnnnnnnnnnnnnnnnnnnnnnnnnnnnnnnnnnnnnnnnnnnnnnnnnnnnnnnnnnnnnnnnnnnnnnnnnnnnnnnnnnnnnnnnnnnnnnnnnnnnnnnnnnnnnnnnnnnnnnnnnnnnnnnnnnnnnnnnnnnnnnnnnnnnnnnnnnnnnnnnnnnnnnnnnnnnnnnnnnnnnnnnnnnnnnnnnnnnnnnnnnnnnnnnnnnnnnnnnnnnnnnnnnnnnnnnnnnnnnnnnnnnnnnnnnnnnnnnnnnnnnnnnnnnnnnnnnnnnnnnnnnnnnnnnnnnnnnnnnnnnnnnnnnnnnnnnnnnnnnnnnnnnnnnnnnnnnnnnnnnnnnnnnnnnnnnnnnnnnnnnnnnnnnnnnnnnnnnnnnnnnnnnnnnnnnnnnnnnnnnnnnnnnnnnnnnnnnnnnnnnnnnnnnnnnnnnnnnnnnnnnnnnnnnnnnnnnnnnnnnnnnnnnnnnnnnnnnnnnnnnnnnnnnnnnnnnnnnnnnnnnnnnnnnnnnnnnnnnnnnnnnnnnnnnnnnnnnnnnnnnnnnnnnnnnnnnnnnnnnnnnnnnnnnnnnnnnnnnnnnnnnnnnnnnnnnnnnnnnnnnnnnnnnnnnnnnnnnnnnnnnnnnnnnnnnnnnnnnnnnnnnnnnnnnnnnnnnnnnnnnnnnnnnnnnnnnnnnnnnnnnnnnnnnnnnnnnnnnnnnnnnnnnnnnnnnnnnnnnnnnnnnnnnnnnnnnnnnnnnnnnnnnnnnnnnnnnnnnnnnnnnnnnnnnnnnnnnnnnnnnnnnnnnnnnnnnnnnnnnnnnnnnnnnnnnnnnnnnnnnnnnnnnnnnnnnnnnnnnnnnnnnnnnnnnnnnnnnnnnnnnnnnnnnnnnnnnnnnnnnnnnnnnnnnnnnnnnnnnnnnnnnnnnnnnnnnnnnnnnnnnnnnnnnnnnnnnnnnnnnnnnnnnnnnnnnnnnnnnnnnnnnnnnnnnnnnnnnnnnnnnnnnnnnnnnnnnnnnnnnnnnnnnnnnnnnnnnnnnnnnnnnnnnnnnnnnnnnnnnnnnnnnnnnnnnnnnnnnnnnnnnnnnnnnnnnnnnnnnnnnnnnnnnnnnnnnnnnnnnnnnnnnnnnnnnnnnnnnnnnnnnnnnnnnnnnnnnnnnnnnnnnnnnnnnnnnnnnnnnnnnnnnnnnnnnnnnnnnnnnnnnnnnnnnnnnnnnnnnnnnnnnnnnnnnnnnnnnnnnnnnnnnnnnnnnnnnnnnnnnnnnnnnnnnnnnnnnnnnnnnnnnnnnnnnnnnnnnnnnnnnnnnnnnnnnnnnnnnnnnnnnnnnnnnnnnnnnnnnnnnnnnnnnnnnnnnnnnnnnnnnnnnnnnnnnnnnnnnnnnnnnnnnnnnnnnnnnnnnnnnnnnnnnnnnnnnnnnnnnnnnnnnnnnnnnnnnnnnnnnnnnnnnnnnnnnnnnnnnnnnnnnnnnnnnnnnnnnnnnnnnnnnnnnnnnnnnnnnnnnnnnnnnnnnnnnnnnnnnnnnnnnnnnnnnnnnnnnnnnnnnnnnnnnnnnnnnnnnnnnnnnnnnnnnnnnnnnnnnnnnnnnnnnnnnnnnnnnnnnnnnnnnnnnnnnnnnnnnnnnnnnnnnnnnnnnnnnnnnnnnnnnnnnnnnnnnnnnnnnnnnnnnnnnnnnnnnnnnnnnnnnnnnnnnnnnnnnnnnnnnnnnnnnnnnnnnnnnnnnnnnnnnnnnnnnnnnnnnnnnnnnnnnnnnnnnnnnnnnnnnnnnnnnnnnnnnnnnnnnnnnnnnnnnnnnnnnnnnnnnnnnnnnnnnnnnnnnnnnnnnnnnnnnnnnnnnnnnnnnnnnnnnnnnnnnnnnnnnnnnnnnnnnnnnnnnnnnnnnnnnnnnnnnnnnnnnnnnnnnnnnnnnnnnnnnnnnnnnnnnnnnnnnnnnnnnnnnnnnnnnnnnnnnnnnnnnnnnnnnnnnnnnnnnnnnnnnnnnnnnnnnnnnnnnnnnnnnnnnnnnnnnnnnnnnnnnnnnnnnnnnnnnnnnnnnnnnnnnnnnnnnnnnnnnnnnnnnnnnnnnnnnnnnnnnnnnnnnnnnnnnnnnnnnnnnnnnnnnnnnnnnnnnnnnnnnnnnnnnnnnnnnnnnnnnnnnnnnnnnnnnnnnnnnnnnnnnnnnnnnnnnnnnnnnnnnnnnnnnnnnnnnnnnnnnnnnnnnnnnnnnnnnnnnnnnnnnnnnnnnnnnnnnnnnnnnnnnnnnnnnnnnnnnnnnnnnnnnnnnnnnnnnnnnnnnnnnnnnnnnnnnnnnnnnnnnnnnnnnnnnnnnnnnnnnnnnnnnnnnnnnnnnnnnnnnnnnnnnnnnnnnnnnnnnnnnnnnnnnnnnnnnnnnnnnnnnnnnnnnnnnnnnnnnnnnnnnnnnnnnnnnnnnnnnnnnnnnnnnnnnnnnnnnnnnnnnnnnnnnnnnnnnnnnnnnnnnnnnnnnnnnnnnnnnnnnnnnnnnnnnnnnnnnnnnnnnnnnnnnnnnnnnnnnnnnnnnnnnnnnnnnnnnnnnnnnnnnnnnnnnnnnnnnnnnnnnnnnnnnnnnnnnnnnnnnnnnnnnnnnnnnnnnnnnnnnnnnnnnnnnnnnnnnnnnnnnnnnnnnnnnnnnnnnnnnnnnnnnnnnnnnnnnnnnnnnnnnnnnnnnnnnnnnnnnnnnnnnnnnnnnnnnnnnnnnnnnnnnnnnnnnnnnnnnnnnnnnnnnnnnnnnnnnnnnnnnnnnnnnnnnnnnnnnnnnnnnnnnnnnnnnnnnnnnnnnnnnnnnnnnnnnnnnnnnnnnnnnnnnnnnnnnnnnnnnnnnnnnnnnnnnnnnnnnnnnnnnnnnnnnnnnnnnnnnnnnnnnnnnnnnnnnnnnnnnnnnnnnnnnnnnnnnnnnnnnnnnnnnnnnnnnnnnnnnnnnnnnnnnnnnnnnnnnnnnnnnnnnnnnnnnnnnnnnnnnnnnnnnnnnnnnnnnnnnnnnnnnnnnnnnnnnnnnnnnnnnnnnnnnnnnnnnnnnnnnnnnnnnnnnnnnnnnnnnnnnnnnnnnnnnnnnnnnnnnnnnnnnnnnnnnnnnnnnnnnnnnnnnnnnnnnnnnnnnnnnnnnnnnnnnnnnnnnnnnnnnnnnnnnnnnnnnnnnnnnnnnnnnnnnnnnnnnnnnnnnnnnnnnnnnnnnnnnnnnnnnnnnnnnnnnnnnnnnnnnnnnnnnnnnnnnnnnnnnnnnnnnnnnnnnnnnnnnnnnnnnnnnnnnnnnnnnnnnnnnnnnnnnnnnnnnnnnnnnnnnnnnnnnnnnnnnnnnnnnnnnnnnnnnnnnnnnnnnnnnnnnnnnnnnnnnnnnnnnnnnnnnnnnnnnnnnnnnnnnnnnnnnnnnnnnnnnnnnnnnnnnnnnnnnnnnnnnnnnnnnnnnnnnnnnnnnnnnnnnnnnnnnnnnnnnnnnnnnnnnnnnnnnnnnnnnnnnnnnnnnnnnnnnnnnnnnnnnnnnnnnnnnnnnnnnnnnnnnnnnnnnnnnnnnnnnnnnnnnnnnnnnnnnnnnnnnnnnnnnnnnnnnnnnnnnnnnnnnnnnnnnnnnnnnnnnnnnnnnnnnnnnnnnnnnnnnnnnnnnnnnnnnnnnnnnnnnnnnnnnnnnnnnnnnnnnnnnnnnnnnnnnnnnnnnnnnnnnnnnnnnnnnnnnnnnnnnnnnnnnnnnnnnnnnnnnnnnnnnnnnnnnnnnnnnnnnnnnnnnnnnnnnnnnnnnnnnnnnnnnnnnnnnnnnnnnnnnnnnnnnnnnnnnnnnnnnnnnnnnnnnnnnnnnnnnnnnnnnnnnnnnnnnnnnnnnnnnnnnnnnnnnnnnnnnnnnnnnnnnnnnnnnnnnnnnnnnnnnnnnnnnnnnnnnnnnnnnnnnnnnnnnnnnnnnnnnnnnnnnnnnnnnnnnnnnnnnnnnnnnnnnnnnnnnnnnnnnnnnnnnnnnnnnnnnnnnnnnnnnnnnnnnnnnnnnnnnnnnnnnnnnnnnnnnnnnnnnnnnnnnnnnnnnnnnnnnnnnnnnnnnnnnnnnnnnnnnnnnnnnnnnnnnnnnnnnnnnnnnnnnnnnnnnnnnnnnnnnnnnnnnnnnnnnnnnnnnnnnnnnnnnnnnnnnnnnnnnnnnnnnnnnnnnnnnnnnnnnnnnnnnnnnnnnnnnnnnnnnnnnnnnnnnnnnnnnnnnnnnnnnnnnnnnnnnnnnnnnnnnnnnnnnnnnnnnnnnnnnnnnnnnnnnnnnnnnnnnnnnnnnnnnnnnnnnnnnnnnnnnnnnnnnnnnnnnnnnnnnnnnnnnnnnnnnnnnnnnnnnnnnnnnnnnnnnnnnnnnnnnnnnnnnnnnnnnnnnnnnnnnnnnnnnnnnnnnnnnnnnnnnnnnnnnnnnnnnnnnnnnnnnnnnnnnnnnnnnnnnnnnnnnnnnnnnnnnnnnnnnnnnnnnnnnnnnnnnnnnnnnnnnnnnnnnnnnnnnnnnnnnnnnnnnnnnnnnnnnnnnnnnnnnnnnnnnnnnnnnnnnnnnnnnnnnnnnnnnnnnnnnnnnnnnnnnnnnnnnnnnnnnnnnnnnnnnnnnnnnnnnnnnnnnnnnnnnnnnnnnnnnnnnnnnnnnnnnnnnnnnnnnnnnnnnnnnnnnnnnnnnnnnnnnnnnnnnnnnnnnnnnnnnnnnnnnnnnnnnnnnnnnnnnnnnnnnnnnnnnnnnnnnnnnnnnnnnnnnnnnnnnnnnnnnnnnnnnnnnnnnnnnnnnnnnnnnnnnnnnnnnnnnnnnnnnnnnnnnnnnnnnnnnnnnnnnnnnnnnnnnnnnnnnnnnnnnnnnnnnnnnnnnnnnnnnnnnnnnnnnnnnnnnnnnnnnnnnnnnnnnnnnnnnnnnnnnnnnnnnnnnnnnnnnnnnnnnnnnnnnnnnnnnnnnnnnnnnnnnnnnnnnnnnnnnnnnnnnnnnnnnnnnnnnnnnnnnnnnnnnnnnnnnnnnnnnnnnnnnnnnnnnnnnnnnnnnnnnnnnnnnnnnnnnnnnnnnnnnnnnnnnnnnnnnnnnnnnnnnnnnnnnnnnnnnnnnnnnnnnnnnnnnnnnnnnnnnnnnnnnnnnnnnnnnnnnnnnnnnnnnnnnnnnnnnnnnnnnnnnnnnnnnnnnnnnnnnnnnnnnnnnnnnnnnnnnnnnnnnnnnnnnnnnnnnnnnnnnnnnnnnnnnnnnnnnnnnnnnnnnnnnnnnnnnnnnnnnnnnnnnnnnnnnnnnnnnnnnnnnnnnnnnnnnnnnnnnnnnnnnnnnnnnnnnnnnnnnnnnnnnnnnnnnnnnnnnnnnnnnnnnnnnnnnnnnnnnnnnnnnnnnnnnnnnnnnnnnnnnnnnnnnnnnnnnnnnnnnnnnnnnnnnnnnnnnnnnnnnnnnnnnnnnnnnnnnnnnnnnnnnnnnnnnnnnnnnnnnnnnnnnnnnnnnnnnnnnnnnnnnnnnnnnnnnnnnnnnnnnnnnnnnnnnnnnnnnnnnnnnnnnnnnnnnnnnnnnnnnnnnnnnnnnnnnnnnnnnnnnnnnnnnnnnnnnnnnnnnnnnnnnnnnnnnnnnnnnnnnnnnnnnnnnnnnnnnnnnnnnnnnnnnnnnnnnnnnnnnnnnnnnnnnnnnnnnnnnnnnnnnnnnnnnnnnnnnnnnnnnnnnnnnnnnnnnnnnnnnnnnnnnnnnnnnnnnnnnnnnnnnnnnnnnnnnnnnnnnnnnnnnnnnnnnnnnnnnnnnnnnnnnnnnnnnnnnnnnnnnnnnnnnnnnnnnnnnnnnnnnnnnnnnnnnnnnnnnnnnnnnnnnnnnnnnnnnnnnnnnnnnnnnnnnnnnnnnnnnnnnnnnnnnnnnnnnnnnnnnnnnnnnnnnnnnnnnnnnnnnnnnnnnnnnnnnnnnnnnnnnnnnnnnnnnnnnnnnnnnnnnnnnnnnnnnnnnnnnnnnnnnnnnnnnnnnnnnnnnnnnnnnnnnnnnnnnnnnnnnnnnnnnnnnnnnnnnnnnnnnnnnnnnnnnnnnnnnnnnnnnnnnnnnnnnnnnnnnnnnnnnnnnnnnnnnnnnnnnnnnnnnnnnnnnnnnnnnnnnnnnnnnnnnnnnnnnnnnnnnnnnnnnnnnnnnnnnnnnnnnnnnnnnnnnnnnnnnnnnnnnnnnnnnnnnnnnnnnnnnnnnnnnnnnnnnnnnnnnnnnnnnnnnnnnnnnnnnnnnnnnnnnnnnnnnnnnnnnnnnnnnnnnnnnnnnnnnnnnnnnnnnnnnnnnnnnnnnnnnnnnnnnnnnnnnnnnnnnnnnnnnnnnnnnnnnnnnnnnnnnnnnnnnnnnnnnnnnnnnnnnnnnnnnnnnnnnnnnnnnnnnnnnnnnnnnnnnnnnnnnnnnnnnnnnnnnnnnnnnnnnnnnnnnnnnnnnnnnnnnnnnnnnnnnnnnnnnnnnnnnnnnnnnnnnnnnnnnnnnnnnnnnnnnnnnnnnnnnnnnnnnnnnnnnnnnnnnnnnnnnnnnnnnnnnnnnnnnnnnnnnnnnnnnnnnnnnnnnnnnnnnnnnnnnnnnnnnnnnnnnnnnnnnnnnnnnnnnnnnnnnnnnnnnnnnnnnnnnnnnnnnnnnnnnnnnnnnnnnnnnnnnnnnnnnnnnnnnnnnnnnnnnnnnnnnnnnnnnnnnnnnnnnnnnnnnnnnnnnnnnnnnnnnnnnnnnnnnnnnnnnnnnnnnnnnnnnnnnnnnnnnnnnnnnnnnnnnnnnnnnnnnnnnnnnnnnnnnnnnnnnnnnnnnnnnnnnnnnnnnnnnnnnnnnnnnnnnnnnnnnnnnnnnnnnnnnnnnnnnnnnnnnnnnnnnnnnnnnnnnnnnnnnnnnnnnnnnnnnnnnnnnnnnnnnnnnnnnnnnnnnnnnnnnnnnnnnnnnnnnnnnnnnnnnnnnnnnnnnnnnnnnnnnnnnnnnnnnnnnnnnnnnnnnnnnnnnnnnnnnnnnnnnnnnnnnnnnnnnnnnnnnnnnnnnnnnnnnnnnnnnnnnnnnnnnnnnnnnnnnnnnnnnnnnnnnnnnnnnnnnnnnnnnnnnnnnnnnnnnnnnnnnnnnnnnnnnnnnnnnnnnnnnnnnnnnnnnnnnnnnnnnnnnnnnnnnnnnnnnnnnnnnnnnnnnnnnnnnnnnnnnnnnnnnnnnnnnnnnnnnnnnnnnnnnnnnnnnnnnnnnnnnnnnnnnnnnnnnnnnnnnnnnnnnnnnnnnnnnnnnnnnnnnnnnnnnnnnnnnnnnnnnnnnnnnnnnnnnnnnnnnnnnnnnnnnnnnnnnnnnnnnnnnnnnnnnnnnnnnnnnnnnnnnnnnnnnnnnnnnnnnnnnnnnnnnnnnnnnnnnnnnnnnnnnnnnnnnnnnnnnnnnnnnnnnnnnnnnnnnnnnnnnnnnnnnnnnnnnnnnnnnnnnnnnnnnnnnnnnnnnnnnnnnnnnnnnnnnnnnnnnnnnnnnnnnnnnnnnnnnnnnnnnnnnnnnnnnnnnnnnnnnnnnnnnnnnnnnnnnnnnnnnnnnnnnnnnnnnnnnnnnnnnnnnnnnnnnnnnnnnnnnnnnnnnnnnnnnnnnnnnnnnnnnnnnnnnnnnnnnnnnnnnnnnnnnnnnnnnnnnnnnnnnnnnnnnnnnnnnnnnnnnnnnnnnnnnnnnnnnnnnnnnnnnnnnnnnnnnnnnnnnnnnnnnnnnnnnnnnnnnnnnnnnnnnnnnnnnnnnnnnnnnnnnnnnnnnnnnnnnnnnnnnnnnnnnnnnnnnnnnnnnnnnnnnnnnnnnnnnnnnnnnnnnnnnnnnnnnnnnnnnnnnnnnnnnnnnnnnnnnnnnnnnnnnnnnnnnnnnnnnnnnnnnnnnnnnnnnnnnnnnnnnnnnnnnnnnnnnnnnnnnnnnnnnnnnnnnnnnnnnnnnnnnnnnnnnnnnnnnnnnnnnnnnnnnnnnnnnnnnnnnnnnnnnnnnnnnnnnnnnnnnnnnnnnnnnnnnnnnnnnnnnnnnnnnnnnnnnnnnnnnnnnnnnnnnnnnnnnnnnnnnnnnnnnnnnnnnnnnnnnnnnnnnnnnnnnnnnnnnnnnnnnnnnnnnnnnnnnnnnnnnnnnnnnnnnnnnnnnnnnnnnnnnnnnnnnnnnnnnnnnnnnnnnnnnnnnnnnnnnnnnnnnnnnnnnnnnnnnnnnnnnnnnnnnnnnnnnnnnnnnnnnnnnnnnnnnnnnnnnnnnnnnnnnnnnnnnnnnnnnnnnnnnnnnnnnnnnnnnnnnnnnnnnnnnnnnnnnnnnnnnnnnnnnnnnnnnnnnnnnnnnnnnnnnnnnnnnnnnnnnnnnnnnnnnnnnnnnnnnnnnnnnnnnnnnnnnnnnnnnnnnnnnnnnnnnnnnnnnnnnnnnnnnnnnnnnnnnnnnnnnnnnnnnnnnnnnnnnnnnnnnnnnnnnnnnnnnnnnnnnnnnnnnnnnnnnnnnnnnnnnnnnnnnnnnnnnnnnnnnnnnnnnnnnnnnnnnnnnnnnnnnnnnnnnnnnnnnnnnnnnnnnnnnnnnnnnnnnnnnnnnnnnnnnnnnnnnnnnnnnnnnnnnnnnnnnnnnnnnnnnnnnnnnnnnnnnnnnnnnnnnnnnnnnnnnnnnnnnnnnnnnnnnnnnnnnnnnnnnnnnnnnnnnnnnnnnnnnnnnnnnnnnnnnnnnnnnnnnnnnnnnnnnnnnnnnnnnnnnnnnnnnnnnnnnnnnnnnnnnnnnnnnnnnnnnnnnnnnnnnnnnnnnnnnnnnnnnnnnnnnnnnnnnnnnnnnnnnnnnnnnnnnnnnnnnnnnnnnnnnnnnnnnnnnnnnnnnnnnnnnnnnnnnnnnnnnnnnnnnnnnnnnnnnnnnnnnnnnnnnnnnnnnnnnnnnnnnnnnnnnnnnnnnnnnnnnnnnnnnnnnnnnnnnnnnnnnnnnnnnnnnnnnnnnnnnnnnnnnnnnnnnnnnnnnnnnnnnnnnnnnnnnnnnnnnnnnnnnnnnnnnnnnnnnnnnnnnnnnnnnnnnnnnnnnnnnnnnnnnnnnnnnnnnnnnnnnnnnnnnnnnnnnnnnnnnnnnnnnnnnnnnnnnnnnnnnnnnnnnnnnnnnnnnnnnnnnnnnnnnnnnnnnnnnnnnnnnnnnnnnnnnnnnnnnnnnnnnnnnnnnnnnnnnnnnnnnnnnnnnnnnnnnnnnnnnnnnnnnnnnnnnnnnnnnnnnnnnnnnnnnnnnnnnnnnnnnnnnnnnnnnnnnnnnnnnnnnnnnnnnnnnnnnnnnnnnnnnnnnnnnnnnnnnnnnnnnnnnnnnnnnnnnnnnnnnnnnnnnnnnnnnnnnnnnnnnnnnnnnnnnnnnnnnnnnnnnnnnnnnnnnnnnnnnnnnnnnnnnnnnnnnnnnnnnnnnnnnnnnnnnnnnnnnnnnnnnnnnnnnnnnnnnnnnnnnnnnnnnnnnnnnnnnnnnnnnnnnnnnnnnnnnnnnnnnnnnnnnnnnnnnnnnnnnnnnnnnnnnnnnnnnnnnnnnnnnnnnnnnnnnnnnnnnnnnnnnnnnnnnnnnnnnnnnnnnnnnnnnnnnnnnnnnnnnnnnnnnnnnnnnnnnnnnnnnnnnnnnnnnnnnnnnnnnnnnnnnnnnnnnnnnnnnnnnnnnnnnnnnnnnnnnnnnnnnnnnnnnnnnnnnnnnnnnnnnnnnnnnnnnnnnnnnnnnnnnnnnnnnnnnnnnnnnnnnnnnnnnnnnnnnnnnnnnnnnnnnnnnnnnnnnnnnnnnnnnnnnnnnnnnnnnnnnnnnnnnnnnnnnnnnnnnnnnnnnnnnnnnnnnnnnnnnnnnnnnnnnnnnnnnnnnnnnnnnnnnnnnnnnnnnnnnnnnnnnnnnnnnnnnnnnnnnnnnnnnnnnnnnnnnnnnnnnnnnnnnnnnnnnnnnnnnnnnnnnnnnnnnnnnnnnnnnnnnnnnnnnnnnnnnnnnnnnnnnnnnnnnnnnnnnnnnnnnnnnnnnnnnnnnnnnnnnnnnnnnnnnnnnnnnnnnnnnnnnnnnnnnnnnnnnnnnnnnnnnnnnnnnnnnnnnnnnnnnnnnnnnnnnnnnnnnnnnnnnnnnnnnnnnnnnnnnnnnnnnnnnnnnnnnnnnnnnnnnnnnnnnnnnnnnnnnnnnnnnnnnnnnnnnnnnnnnnnnnnnnnnnnnnnnnnnnnnnnnnnnnnnnnnnnnnnnnnnnnnnnnnnnnnnnnnnnnnnnnnnnnnnnnnnnnnnnnnnnnnnnnnnnnnnnnnnnnnnnnnnnnnnnnnnnnnnnnnnnnnnnnnnnnnnnnnnnnnnnnnnnnnnnnnnnnnnnnnnnnnnnnnnnnnnnnnnnnnnnnnnnnnnnnnnnnnnnnnnnnnnnnnnnnnnnnnnnnnnnnnnnnnnnnnnnnnnnnnnnnnnnnnnnnnnnnnnnnnnnnnnnnnnnnnnnnnnnnnnnnnnnnnnnnnnnnnnnnnnnnnnnnnnnnnnnnnnnnnnnnnnnnnnnnnnnnnnnnnnnnnnnnnnnnnnnnnnnnnnnnnnnnnnnnnnnnnnnnnnnnnnnnnnnnnnnnnnnnnnnnnnnnnnnnnnnnnnnnnnnnnnnnnnnnnnnnnnnnnnnnnnnnnnnnnnnnnnnnnnnnnnnnnnnnnnnnnnnnnnnnnnnnnnnnnnnnnnnnnnnnnnnnnnnnnnnnnnnnnnnnnnnnnnnnnnnnnnnnnnnnnnnnnnnnnnnnnnnnnnnnnnnnnnnnnnnnnnnnnnnnnnnnnnnnnnnnnnnnnnnnnnnnnnnnnnnnnnnnnnnnnnnnnnnnnnnnnnnnnnnnnnnnnnnnnnnnnnnnnnnnnnnnnnnnnnnnnnnnnnnnnnnnnnnnnnnnnnnnnnnnnnnnnnnnnnnnnnnnnnnnnnnnnnnnnnnnnnnnnnnnnnnnnnnnnnnnnnnnnnnnnnnnnnnnnnnnnnnnnnnnnnnnnnnnnnnnnnnnnnnnnnnnnnnnnnnnnnnnnnnnnnnnnnnnnnnnnnnnnnnnnnnnnnnnnnnnnnnnnnnnnnnnnnnnnnnnnnnnnnnnnnnnnnnnnnnnnnnnnnnnnnnnnnnnnnnnnnnnnnnnnnnnnnnnnnnnnnnnnnnnnnnnnnnnnnnnnnnnnnnnnnnnnnnnnnnnnnnnnnnnnnnnnnnnnnnnnnnnnnnnnnnnnnnnnnnnnnnnnnnnnnnnnnnnnnnnnnnnnnnnnnnnnnnnnnnnnnnnnnnnnnnnnnnnnnnnnnnnnnnnnnnnnnnnnnnnnnnnnnnnnnnnnnnnnnnnnnnnnnnnnnnnnnnnnnnnnnnnnnnnnnnnnnnnnnnnnnnnnnnnnnnnnnnnnnnnnnnnnnnnnnnnnnnnnnnnnnnnnnnnnnnnnnnnnnnnnnnnnnnnnnnnnnnnnnnnnnnnnnnnnnnnnnnnnnnnnnnnnnnnnnnnnnnnnnnnnnnnnnnnnnnnnnnnnnnnnnnnnnnnnnnnnnnnnnnnnnnnnnnnnnnnnnnnnnnnnnnnnnnnnnnnnnnnnnnnnnnnnnnnnnnnnnnnnnnnnnnnnnnnnnnnnnnnnnnnnnnnnnnnnnnnnnnnnnnnnnnnnnnnnnnnnnnnnnnnnnnnnnnnnnnnnnnnnnnnnnnnnnnnnnnnnnnnnnnnnnnnnnnnnnnnnnnnnnnnnnnnnnnnnnnnnnnnnnnnnnnnnnnnnnnnnnnnnnnnnnnnnnnnnnnnnnnnnnnnnnnnnnnnnnnnnnnnnnnnnnnnnnnnnnnnnnnnnnnnnnnnnnnnnnnnnnnnnnnnnnnnnnnnnnnnnnnnnnnnnnnnnnnnnnnnnnnnnnnnnnnnnnnnnnnnnnnnnnnnnnnnnnnnnnnnnnnnnnnnnnnnnnnnnnnnnnnnnnnnnnnnnnnnnnnnnnnnnnnnnnnnnnnnnnnnnnnnnnnnnnnnnnnnnnnnnnnnnnnnnnnnnnnnnnnnnnnnnnnnnnnnnnnnnnnnnnnnnnnnnnnnnnnnnnnnnnnnnnnnnnnnnnnnnnnnnnnnnnnnnnnnnnnnnnnnnnnnnnnnnnnnnnnnnnnnnnnnnnnnnnnnnnnnnnnnnnnnnnnnnnnnnnnnnnnnnnnnnnnnnnnnnnnnnnnnnnnnnnnnnnnnnnnnnnnnnnnnnnnnnnnnnnnnnnnnnnnnnnnnnnnnnnnnnnnnnnnnnnnnnnnnnnnnnnnnnnnnnnnnnnnnnnnnnnnnnnnnnnnnnnnnnnnnnnnnnnnnnnnnnnnnnnnnnnnnnnnnnnnnnnnnnnnnnnnnnnnnnnnnnnnnnnnnnnnnnnnnnnnnnnnnnnnnnnnnnnnnnnnnnnnnnnnnnnnnnnnnnnnnnnnnnnnnnnnnnnnnnnnnnnnnnnnnnnnnnnnnnnnnnnnnnnnnnnnnnnnnnnnnnnnnnnnnnnnnnnnnnnnnnnnnnnnnnnnnnnnnnnnnnnnnnnnnnnnnnnnnnnnnnnnnnnnnnnnnnnnnnnnnnnnnnnnnnnnnnnnnnnnnnnnnnnnnnnnnnnnnnnnnnnnnnnnnnnnnnnnnnnnnnnnnnnnnnnnnnnnnnnnnnnnnnnnnnnnnnnnnnnnnnnnnnnnnnnnnnnnnnnnnnnnnnnnnnnnnnnnnnnnnnnnnnnnnnnnnnnnnnnnnnnnnnnnnnnnnnnnnnnnnnnnnnnnnnnnnnnnnnnnnnnnnnnnnnnnnnnnnnnnnnnnnnnnnnnnnnnnnnnnnnnnnnnnnnnnnnnnnnnnnnnnnnnnnnnnnnnnnnnnnnnnnnnnnnnnnnnnnnnnnnnnnnnnnnnnnnnnnnnnnnnnnnnnnnnnnnnnnnnnnnnnnnnnnnnnnnnnnnnnnnnnnnnnnnnnnnnnnnnnnnnnnnnnnnnnnnnnnnnnnnnnnnnnnnnnnnnnnnnnnnnnnnnnnnnnnnnnnnnnnnnnnnnnnnnnnnnnnnnnnnnnnnnnnnnnnnnnnnnnnnnnnnnnnnnnnnnnnnnnnnnnnnnnnnnnnnnnnnnnnnnnnnnnnnnnnnnnnnnnnnnnnnnnnnnnnnnnnnnnnnnnnnnnnnnnnnnnnnnnnnnnnnnnnnnnnnnnnnnnnnnnnnnnnnnnnnnnnnnnnnnnnnnnnnnnnnnnnnnnnnnnnnnnnnnnnnnnnnnnnnnnnnnnnnnnnnnnnnnnnnnnnnnnnnnnnnnnnnnnnnnnnnnnnnnnnnnnnnnnnnnnnnnnnnnnnnnnnnnnnnnnnnnnnnnnnnnnnnnnnnnnnnnnnnnnnnnnnnnnnnnnnnnnnnnnnnnnnnnnnnnnnnnnnnnnnnnnnnnnnnnnnnnnnnnnnnnnnnnnnnnnnnnnnnnnnnnnnnnnnnnnnnnnnnnnnnnnnnnnnnnnnnnnnnnnnnnnnnnnnnnnnnnnnnnnnnnnnnnnnnnnnnnnnnnnnnnnnnnnnnnnnnnnnnnnnnnnnnnnnnnnnnnnnnnnnnnnnnnnnnnnnnnnnnnnnnnnnnnnnnnnnnnnnnnnnnnnnnnnnnnnnnnnnnnnnnnnnnnnnnnnnnnnnnnnnnnnnnnnnnnnnnnnnnnnnnnnnnnnnnnnnnnnnnnnnnnnnnnnnnnnnnnnnnnnnnnnnnnnnnnnnnnnnnnnnnnnnnnnnnnnnnnnnnnnnnnnnnnnnnnnnnnnnnnnnnnnnnnnnnnnnnnnnnnnnnnnnnnnnnnnnnnnnnnnnnnnnnnnnnnnnnnnnnnnnnnnnnnnnnnnnnnnnnnnnnnnnnnnnnnnnnnnnnnnnnnnnnnnnnnnnnnnnnnnnnnnnnnnnnnnnnnnnnnnnnnnnnnnnnnnnnnnnnnnnnnnnnnnnnnnnnnnnnnnnnnnnnnnnnnnnnnnnnnnnnnnnnnnnnnnnnnnnnnnnnnnnnnnnnnnnnnnnnnnnnnnnnnnnnnnnnnnnnnnnnnnnnnnnnnnnnnnnnnnnnnnnnnnnnnnnnnnnnnnnnnnnnnnnnnnnnnnnnnnnnnnnnnnnnnnnnnnnnnnnnnnnnnnnnnnnnnnnnnnnnnnnnnnnnnnnnnnnnnnnnnnnnnnnnnnnnnnnnnnnnnnnnnnnnnnnnnnnnnnnnnnnnnnnnnnnnnnnnnnnnnnnnnnnnnnnnnnnnnnnnnnnnnnnnnnnnnnnnnnnnnnnnnnnnnnnnnnnnnnnnnnnnnnnnnnnnnnnnnnnnnnnnnnnnnnnnnnnnnnnnnnnnnnnnnnnnnnnnnnnnnnnnnnnnnnnnnnnnnnnnnnnnnnnnnnnnnnnnnnnnnnnnnnnnnnnnnnnnnnnnnnnnnnnnnnnnnnnnnnnnnnnnnnnnnnnnnnnnnnnnnnnnnnnnnnnnnnnnnnnnnnnnnnnnnnnnnnnnnnnnnnnnnnnnnnnnnnnnnnnnnnnnnnnnnnnnnnnnnnnnnnnnnnnnnnnnnnnnnnnnnnnnnnnnnnnnnnnnnnnnnnnnnnnnnnnnnnnnnnnnnnnnnnnnnnnnnnnnnnnnnnnnnnnnnnnnnnnnnnnnnnnnnnnnnnnnnnnnnnnnnnnnnnnnnnnnnnnnnnnnnnnnnnnnnnnnnnnnnnnnnnnnnnnnnnnnnnnnnnnnnnnnnnnnnnnnnnnnnnnnnnnnnnnnnnnnnnnnnnnnnnnnnnnnnnnnnnnnnnnnnnnnnnnnnnnnnnnnnnnnnnnnnnnnnnnnnnnnnnnnnnnnnnnnnnnnnnnnnnnnnnnnnnnnnnnnnnnnnnnnnnnnnnnnnnnnnnnnnnnnnnnnnnnnnnnnnnnnnnnnnnnnnnnnnnnnnnnnnnnnnnnnnnnnnnnnnnnnnnnnnnnnnnnnnnnnnnnnnnnnnnnnnnnnnnnnnnnnnnnnnnnnnnnnnnnnnnnnnnnnnnnnnnnnnnnnnnnnnnnnnnnnnnnnnnnnnnnnnnnnnnnnnnnnnnnnnnnnnnnnnnnnnnnnnnnnnnnnnnnnnnnnnnnnnnnnnnnnnnnnnnnnnnnnnnnnnnnnnnnnnnnnnnnnnnnnnnnnnnnnnnnnnnnnnnnnnnnnnnnnnnnnnnnnnnnnnnnnnnnnnnnnnnnnnnnnnnnnnnnnnnnnnnnnnnnnnnnnnnnnnnnnnnnnnnnnnnnnnnnnnnnnnnnnnnnnnnnnnnnnnnnnnnnnnnnnnnnnnnnnnnnnnnnnnnnnnnnnnnnnnnnnnnnnnnnnnnnnnnnnnnnnnnnnnnnnnnnnnnnnnnnnnnnnnnnnnnnnnnnnnnnnnnnnnnnnnnnnnnnnnnnnnnnnnnnnnnnnnnnnnnnnnnnnnnnnnnnnnnnnnnnnnnnnnnnnnnnnnnnnnnnnnnnnnnnnnnnnnnnnnnnnnnnnnnnnnnnnnnnnnnnnnnnnnnnnnnnnnnnnnnnnnnnnnnnnnnnnnnnnnnnnnnnnnnnnnnnnnnnnnnnnnnnnnnnnnnnnnnnnnnnnnnnnnnnnnnnnnnnnnnnnnnnnnnnnnnnnnnnnnnnnnnnnnnnnnnnnnnnnnnnnnnnnnnnnnnnnnnnnnnnnnnnnnnnnnnnnnnnnnnnnnnnnnnnnnnnnnnnnnnnnnnnnnnnnnnnnnnnnnnnnnnnnnnnnnnnnnnnnnnnnnnnnnnnnnnnnnnnnnnnnnnnnnnnnnnnnnnnnnnnnnnnnnnnnnnnnnnnnnnnnnnnnnnnnnnnnnnnnnnnnnnnnnnnnnnnnnnnnnnnnnnnnnnnnnnnnnnnnnnnnnnnnnnnnnnnnnnnnnnnnnnnnnnnnnnnnnnnnnnnnnnnnnnnnnnnnnnnnnnnnnnnnnnnnnnnnnnnnnnnnnnnnnnnnnnnnnnnnnnnnnnnnnnnnnnnnnnnnnnnnnnnnnnnnnnnnnnnnnnnnnnnnnnnnnnnnnnnnnnnnnnnnnnnnnnnnnnnnnnnnnnnnnnnnnnnnnnnnnnnnnnnnnnnnnnnnnnnnnnnnnnnnnnnnnnnnnnnnnnnnnnnnnnnnnnnnnnnnnnnnnnnnnnnnnnnnnnnnnnnnnnnnnnnnnnnnnnnnnnnnnnnnnnnnnnnnnnnnnnnnnnnnnnnnnnnnnnnnnnnnnnnnnnnnnnnnnnnnnnnnnnnnnnnnnnnnnnnnnnnnnnnnnnnnnnnnnnnnnnnnnnnnnnnnnnnnnnnnnnnnnnnnnnnnnnnnnnnnnnnnnnnnnnnnnnnnnnnnnnnnnnnnnnnnnnnnnnnnnnnnnnnnnnnnnnnnnnnnnnnnnnnnnnnnnnnnnnnnnnnnnnnnnnnnnnnnnnnnnnnnnnnnnnnnnnnnnnnnnnnnnnnnnnnnnnnnnnnnnnnnnnnnnnnnnnnnnnnnnnnnnnnnnnnnnnnnnnnnnnnnnnnnnnnnnnnnnnnnnnnnnnnnnnnnnnnnnnnnnnnnnnnnnnnnnnnnnnnnnnnnnnnnnnnnnnnnnnnnnnnnnnnnnnnnnnnnnnnnnnnnnnnnnnnnnnnnnnnnnnnnnnnnnnnnnnnnnnnnnnnnnnnnnnnnnnnnnnnnnnnnnnnnnnnnnnnnnnnnnnnnnnnnnnnnnnnnnnnnnnnnnnnnnnnnnnnnnnnnnnnnnnnnnnnnnnnnnnnnnnnnnnnnnnnnnnnnnnnnnnnnnnnnnnnnnnnnnnnnnnnnnnnnnnnnnnnnnnnnnnnnnnnnnnnnnnnnnnnnnnnnnnnnnnnnnnnnnnnnnnnnnnnnnnnnnnnnnnnnnnnnnnnnnnnnnnnnnnnnnnnnnnnnnnnnnnnnnnnnnnnnnnnnnnnnnnnnnnnnnnnnnnnnnnnnnnnnnnnnnnnnnnnnnnnnnnnnnnnnnnnnnnnnnnnnnnnnnnnnnnnnnnnnnnnnnnnnnnnnnnnnnnnnnnnnnnnnnnnnnnnnnnnnnnnnnnnnnnnnnnnnnnnnnnnnnnnnnnnnnnnnnnnnnnnnnnnnnnnnnnnnnnnnnnnnnnnnnnnnnnnnnnnnnnnnnnnnnnnnnnnnnnnnnnnnnnnnnnnnnnnnnnnnnnnnnnnnnnnnnnnnnnnnnnnnnnnnnnnnnnnnnnnnnnnnnnnnnnnnnnnnnnnnnnnnnnnnnnnnnnnnnnnnnnnnnnnnnnnnnnnnnnnnnnnnnnnnnnnnnnnnnnnnnnnnnnnnnnnnnnnnnnnnnnnnnnnnnnnnnnnnnnnnnnnnnnnnnnnnnnnnnnnnnnnnnnnnnnnnnnnnnnnnnnnnnnnnnnnnnnnnnnnnnnnnnnnnnnnnnnnnnnnnnnnnnnnnnnnnnnnnnnnnnnnnnnnnnnnnnnnnnnnnnnnnnnnnnnnnnnnnnnnnnnnnnnnnnnnnnnnnnnnnnnnnnnnnnnnnnnnnnnnnnnnnnnnnnnnnnnnnnnnnnnnnnnnnnnnnnnnnnnnnnnnnnnnnnnnnnnnnnnnnnnnnnnnnnnnnnnnnnnnnnnnnnnnnnnnnnnnnnnnnnnnnnnnnnnnnnnnnnnnnnnnnnnnnnnnnnnnnnnnnnnnnnnnnnnnnnnnnnnnnnnnnnnnnnnnnnnnnnnnnnnnnnnnnnnnnnnnnnnnnnnnnnnnnnnnnnnnnnnnnnnnnnnnnnnnnnnnnnnnnnnnnnnnnnnnnnnnnnnnnnnnnnnnnnnnnnnnnnnnnnnnnnnnnnnnnnnnnnnnnnnnnnnnnnnnnnnnnnnnnnnnnnnnnnnnnnnnnnnnnnnnnnnnnnnnnnnnnnnnnnnnnnnnnnnnnnnnnnnnnnnnnnnnnnnnnnnnnnnnnnnnnnnnnnnnnnnnnnnnnnnnnnnnnnnnnnnnnnnnnnnnnnnnnnnnnnnnnnnnnnnnnnnnnnnnnnnnnnnnnnnnnnnnnnnnnnnnnnnnnnnnnnnnnnnnnnnnnnnnnnnnnnnnnnnnnnnnnnnnnnnnnnnnnnnnnnnnnnnnnnnnnnnnnnnnnnnnnnnnnnnnnnnnnnnnnnnnnnnnnnnnnnnnnnnnnnnnnnnnnnnnnnnnnnnnnnnnnnnnnnnnnnnnnnnnnnnnnnnnnnnnnnnnnnnnnnnnnnnnnnnnnnnnnnnnnnnnnnnnnnnnnnnnnnnnnnnnnnnnnnnnnnnnnnnnnnnnnnnnnnnnnnnnnnnnnnnnnnnnnnnnnnnnnnnnnnnnnnnnnnnnnnnnnnnnnnnnnnnnnnnnnnnnnnnnnnnnnnnnnnnnnnnnnnnnnnnnnnnnnnnnnnnnnnnnnnnnnnnnnnnnnnnnnnnnnnnnnnnnnnnnnnnnnnnnnnnnnnnnnnnnnnnnnnnnnnnnnnnnnnnnnnnnnnnnnnnnnnnnnnnnnnnnnnnnnnnnnnnnnnnnnnnnnnnnnnnnnnnnnnnnnnnnnnnnnnnnnnnnnnnnnnnnnnnnnnnnnnnnnnnnnnnnnnnnnnnnnnnnnnnnnnnnnnnnnnnnnnnnnnnnnnnnnnnnnnnnnnnnnnnnnnnnnnnnnnnnnnnnnnnnnnnnnnnnnnnnnnnnnnnnnnnnnnnnnnnnnnnnnnnnnnnnnnnnnnnnnnnnnnnnnnnnnnnnnnnnnnnnnnnnnnnnnnnnnnnnnnnnnnnnnnnnnnnnnnnnnnnnnnnnnnnnnnnnnnnnnnnnnnnnnnnnnnnnnnnnnnnnnnnnnnnnnnnnnnnnnnnnnnnnnnnnnnnnnnnnnnnnnnnnnnnnnnnnnnnnnnnnnnnnnnnnnnnnnnnnnnnnnnnnnnnnnnnnnnnnnnnnnnnnnnnnnnnnnnnnnnnnnnnnnnnnnnnnnnnnnnnnnnnnnnnnnnnnnnnnnnnnnnnnnnnnnnnnnnnnnnnnnnnnnnnnnnnnnnnnnnnnnnnnnnnnnnnnnnnnnnnnnnnnnnnnnnnnnnnnnnnnnnnnnnnnnnnnnnnnnnnnnnnnnnnnnnnnnnnnnnnnnnnnnnnnnnnnnnnnnnnnnnnnnnnnnnnnnnnnnnnnnnnnnnnnnnnnnnnnnnnnnnnnnnnnnnnnnnnnnnnnnnnnnnnnnnnnnnnnnnnnnnnnnnnnnnnnnnnnnnnnnnnnnnnnnnnnnnnnnnnnnnnnnnnnnnnnnnnnnnnnnnnnnnnnnnnnnnnnnnnnnnnnnnnnnnnnnnnnnnnnnnnnnnnnnnnnnnnnnnnnnnnnnnnnnnnnnnnnnnnnnnnnnnnnnnnnnnnnnnnnnnnnnnnnnnnnnnnnnnnnnnnnnnnnnnnnnnnnnnnnnnnnnnnnnnnnnnnnnnnnnnnnnnnnnnnnnnnnnnnnnnnnnnnnnnnnnnnnnnnnnnnnnnnnnnnnnnnnnnnnnnnnnnnnnnnnnnnnnnnnnnnnnnnnnnnnnnnnnnnnnnnnnnnnnnnnnnnnnnnnnnnnnnnnnnnnnnnnnnnnnnnnnnnnnnnnnnnnnnnnnnnnnnnnnnnnnnnnnnnnnnnnnnnnnnnnnnnnnnnnnnnnnnnnnnnnnnnnnnnnnnnnnnnnnnnnnnnnnnnnnnnnnnnnnnnnnnnnnnnnnnnnnnnnnnnnnnnnnnnnnnnnnnnnnnnnnnnnnnnnnnnnnnnnnnnnnnnnnnnnnnnnnnnnnnnnnnnnnnnnnnnnnnnnnnnnnnnnnnnnnnnnnnnnnnnnnnnnnnnnnnnnnnnnnnnnnnnnnnnnnnnnnnnnnnnnnnnnnnnnnnnnnnnnnnnnnnnnnnnnnnnnnnnnnnnnnnnnnnnnnnnnnnnnnnnnnnnnnnnnnnnnnnnnnnnnnnnnnnnnnnnnnnnnnnnnnnnnnnnnnnnnnnnnnnnnnnnnnnnnnnnnnnnnnnnnnnnnnnnnnnnnnnnnnnnnnnnnnnnnnnnnnnnnnnnnnnnnnnnnnnnnnnnnnnnnnnnnnnnnnnnnnnnnnnnnnnnnnnnnnnnnnnnnnnnnnnnnnnnnnnnnnnnnnnnnnnnnnnnnnnnnnnnnnnnnnnnnnnnnnnnnnnnnnnnnnnnnnnnnnnnnnnnnnnnnnnnnnnnnnnnnnnnnnnnnnnnnnnnnnnnnnnnnnnnnnnnnnnnnnnnnnnnnnnnnnnnnnnnnnnnnnnnnnnnnnnnnnnnnnnnnnnnnnnnnnnnnnnnnnnnnnnnnnnnnnnnnnnnnnnnnnnnnnnnnnnnnnnnnnnnnnnnnnnnnnnnnnnnnnnnnnnnnnnnnnnnnnnnnnnnnnnnnnnnnnnnnnnnnnnnnnnnnnnnnnnnnnnnnnnnnnnnnnnnnnnnnnnnnnnnnnnnnnnnnnnnnnnnnnnnnnnnnnnnnnnnnnnnnnnnnnnnnnnnnnnnnnnnnnnnnnnnnnnnnnnnnnnnnnnnnnnnnnnnnnnnnnnnnnnnnnnnnnnnnnnnnnnnnnnnnnnnnnnnnnnnnnnnnnnnnnnnnnnnnnnnnnnnnnnnnnnnnnnnnnnnnnnnnnnnnnnnnnnnnnnnnnnnnnnnnnnnnnnnnnnnnnnnnnnnnnnnnnnnnnnnnnnnnnnnnnnnnnnnnnnnnnnnnnnnnnnnnnnnnnnnnnnnnnnnnnnnnnnnnnnnnnnnnnnnnnnnnnnnnnnnnnnnnnnnnnnnnnnnnnnnnnnnnnnnnnnnnnnnnnnnnnnnnnnnnnnnnnnnnnnnnnnnnnnnnnnnnnnnnnnnnnnnnnnnnnnnnnnnnnnnnnnnnnnnnnnnnnnnnnnnnnnnnnnnnnnnnnnnnnnnnnnnnnnnnnnnnnnnnnnnnnnnnnnnnnnnnnnnnnnnnnnnnnnnnnnnnnnnnnnnnnnnnnnnnnnnnnnnnnnnnnnnnnnnnnnnnnnnnnnnnnnnnnnnnnnnnnnnnnnnnnnnnnnnnnnnnnnnnnnnnnnnnnnnnnnnnnnnnnnnnnnnnnnnnnnnnnnnnnnnnnnnnnnnnnnnnnnnnnnnnnnnnnnnnnnnnnnnnnnnnnnnnnnnnnnnnnnnnnnnnnnnnnnnnnnnnnnnnnnnnnnnnnnnnnnnnnnnnnnnnnnnnnnnnnnnnnnnnnnnnnnnnnnnnnnnnnnnnnnnnnnnnnnnnnnnnnnnnnnnnnnnnnnnnnnnnnnnnnnnnnnnnnnnnnnnnnnnnnnnnnnnnnnnnnnnnnnnnnnnnnnnnnnnnnnnnnnnnnnnnnnnnnnnnnnnnnnnnnnnnnnnnnnnnnnnnnnnnnnnnnnnnnnnnnnnnnnnnnnnnnnnnnnnnnnnnnnnnnnnnnnnnnnnnnnnnnnnnnnnnnnnnnnnnnnnnnnnnnnnnnnnnnnnnnnnnnnnnnnnnnnnnnnnnnnnnnnnnnnnnnnnnnnnnnnnnnnnnnnnnnnnnnnnnnnnnnnnnnnnnnnnnnnnnnnnnnnnnnnnnnnnnnnnnnnnnnnnnnnnnnnnnnnnnnnnnnnnnnnnnnnnnnnnnnnnnnnnnnnnnnnnnnnnnnnnnnnnnnnnnnnnnnnnnnnnnnnnnnnnnnnnnnnnnnnnnnnnnnnnnnnnnnnnnnnnnnnnnnnnnnnnnnnnnnnnnnnnnnnnnnnnnnnnnnnnnnnnnnnnnnnnnnnnnnnnnnnnnnnnnnnnnnnnnnnnnnnnnnnnnnnnnnnnnnnnnnnnnnnnnnnnnnnnnnnnnnnnnnnnnnnnnnnnnnnnnnnnnnnnnnnnnnnnnnnnnnnnnnnnnnnnnnnnnnnnnnnnnnnnnnnnnnnnnnnnnnnnnnnnnnnnnnnnnnnnnnnnnnnnnnnnnnnnnnnnnnnnnnnnnnnnnnnnnnnnnnnnnnnnnnnnnnnnnnnnnnnnnnnnnnnnnnnnnnnnnnnnnnnnnnnnnnnnnnnnnnnnnnnnnnnnnnnnnnnnnnnnnnnnnnnnnnnnnnnnnnnnnnnnnnnnnnnnnnnnnnnnnnnnnnnnnnnnnnnnnnnnnnnnnnnnnnnnnnnnnnnnnnnnnnnnnnnnnnnnnnnnnnnnnnnnnnnnnnnnnnnnnnnnnnnnnnnnnnnnnnnnnnnnnnnnnnnnnnnnnnnnnnnnnnnnnnnnnnnnnnnnnnnnnnnnnnnnnnnnnnnnnnnnnnnnnnnnnnnnnnnnnnnnnnnnnnnnnnnnnnnnnnnnnnnnnnnnnnnnnnnnnnnnnnnnnnnnnnnnnnnnnnnnnnnnnnnnnnnnnnnnnnnnnnnnnnnnnnnnnnnnnnnnnnnnnnnnnnnnnnnnnnnnnnnnnnnnnnnnnnnnnnnnnnnnnnnnnnnnnnnnnnnnnnnnnnnnnnnnnnnnnnnnnnnnnnnnnnnnnnnnnnnnnnnnnnnnnnnnnnnnnnnnnnnnnnnnnnnnnnnnnnnnnnnnnnnnnnnnnnnnnnnnnnnnnnnnnnnnnnnnnnnnnnnnnnnnnnnnnnnnnnnnnnnnnnnnnnnnnnnnnnnnnnnnnnnnnnnnnnnnnnnnnnnnnnnnnnnnnnnnnnnnnnnnnnnnnnnnnnnnnnnnnnnnnnnnnnnnnnnnnnnnnnnnnnnnnnnnnnnnnnnnnnnnnnnnnnnnnnnnnnnnnnnnnnnnnnnnnnnnnnnnnnnnnnnnnnnnnnnnnnnnnnnnnnnnnnnnnnnnnnnnnnnnnnnnnnnnnnnnnnnnnnnnnnnnnnnnnnnnnnnnnnnnnnnnnnnnnnnnnnnnnnnnnnnnnnnnnnnnnnnnnnnnnnnnnnnnnnnnnnnnnnnnnnnnnnnnnnnnnnnnnnnnnnnnnnnnnnnnnnnnnnnnnnnnnnnnnnnnnnnnnnnnnnnnnnnnnnnnnnnnnnnnnnnnnnnnnnnnnnnnnnnnnnnnnnnnnnnnnnnnnnnnnnnnnnnnnnnnnnnnnnnnnnnnnnnnnnnnnnnnnnnnnnnnnnnnnnnnnnnnnnnnnnnnnnnnnnnnnnnnnnnnnnnnnnnnnnnnnnnnnnnnnnnnnnnnnnnnnnnnnnnnnnnnnnnnnnnnnnnnnnnnnnnnnnnnnnnnnnnnnnnnnnnnnnnnnnnnnnnnnnnnnnnnnnnnnnnnnnnnnnnnnnnnnnnnnnnnnnnnnnnnnnnnnnnnnnnnnnnnnnnnnnnnnnnnnnnnnnnnnnnnnnnnnnnnnnnnnnnnnnnnnnnnnnnnnnnnnnnnnnnnnnnnnnnnnnnnnnnnnnnnnnnnnnnnnnnnnnnnnnnnnnnnnnnnnnnnnnnnnnnnnnnnnnnnnnnnnnnnnnnnnnnnnnnnnnnnnnnnnnnnnnnnnnnnnnnnnnnnnnnnnnnnnnnnnnnnnnnnnnnnnnnnnnnnnnnnnnnnnnnnnnnnnnnnnnnnnnnnnnnnnnnnnnnnnnnnnnnnnnnnnnnnnnnnnnnnnnnnnnnnnnnnnnnnnnnnnnnnnnnnnnnnnnnnnnnnnnnnnnnnnnnnnnnnnnnnnnnnnnnnnnnnnnnnnnnnnnnnnnnnnnnnnnnnnnnnnnnnnnnnnnnnnnnnnnnnnnnnnnnnnnnnnnnnnnnnnnnnnnnnnnnnnnnnnnnnnnnnnnnnnnnnnnnnnnnnnnnnnnnnnnnnnnnnnnnnnnnnnnnnnnnnnnnnnnnnnnnnnnnnnnnnnnnnnnnnnnnnnnnnnnnnnnnnnnnnnnnnnnnnnnnnnnnnnnnnnnnnnnnnnnnnnnnnnnnnnnnnnnnnnnnnnnnnnnnnnnnnnnnnnnnnnnnnnnnnnnnnnnnnnnnnnnnnnnnnnnnnnnnnnnnnnnnnnnnnnnnnnnnnnnnnnnnnnnnnnnnnnnnnnnnnnnnnnnnnnnnnnnnnnnnnnnnnnnnnnnnnnnnnnnnnnnnnnnnnnnnnnnnnnnnnnnnnnnnnnnnnnnnnnnnnnnnnnnnnnnnnnnnnnnnnnnnnnnnnnnnnnnnnnnnnnnnnnnnnnnnnnnnnnnnnnnnnnnnnnnnnnnnnnnnnnnnnnnnnnnnnnnnnnnnnnnnnnnnnnnnnnnnnnnnnnnnnnnnnnnnnnnnnnnnnnnnnnnnnnnnnnnnnnnnnnnnnnnnnnnnnnnnnnnnnnnnnnnnnnnnnnnnnnnnnnnnnnnnnnnnnnnnnnnnnnnnnnnnnnnnnnnnnnnnnnnnnnnnnnnnnnnnnnnnnnnnnnnnnnnnnnnnnnnnnnnnnnnnnnnnnnnnnnnnnnnnnnnnnnnnnnnnnnnnnnnnnnnnnnnnnnnnnnnnnnnnnnnnnnnnnnnnnnnnnnnnnnnnnnnnnnnnnnnnnnnnnnnnnnnnnnnnnnnnnnnnnnnnnnnnnnnnnnnnnnnnnnnnnnnnnnnnnnnnnnnnnnnnnnnnnnnnnnnnnnnnnnnnnnnnnnnnnnnnnnnnnnnnnnnnnnnnnnnnnnnnnnnnnnnnnnnnnnnnnnnnnnnnnnnnnnnnnnnnnnnnnnnnnnnnnnnnnnnnnnnnnnnnnnnnnnnnnnnnnnnnnnnnnnnnnnnnnnnnnnnnnnnnnnnnnnnnnnnnnnnnnnnnnnnnnnnnnnnnnnnnnnnnnnnnnnnnnnnnnnnnnnnnnnnnnnnnnnnnnnnnnnnnnnnnnnnnnnnnnnnnnnnnnnnnnnnnnnnnnnnnnnnnnnnnnnnnnnnnnnnnnnnnnnnnnnnnnnnnnnnnnnnnnnnnnnnnnnnnnnnnnnnnnnnnnnnnnnnnnnnnnnnnnnnnnnnnnnnnnnnnnnnnnnnnnnnnnnnnnnnnnnnnnnnnnnnnnnnnnnnnnnnnnnnnnnnnnnnnnnnnnnnnnnnnnnnnnnnnnnnnnnnnnnnnnnnnnnnnnnnnnnnnnnnnnnnnnnnnnnnnnnnnnnnnnnnnnnnnnnnnnnnnnnnnnnnnnnnnnnnnnnnnnnnnnnnnnnnnnnnnnnnnnnnnnnnnnnnnnnnnnnnnnnnnnnnnnnnnnnnnnnnnnnnnnnnnnnnnnnnnnnnnnnnnnnnnnnnnnnnnnnnnnnnnnnnnnnnnnnnnnnnnnnnnnnnnnnnnnnnnnnnnnnnnnnnnnnnnnnnnnnnnnnnnnnnnnnnnnnnnnnnnnnnnnnnnnnnnnnnnnnnnnnnnnnnnnnnnnnnnnnnnnnnnnnnnnnnnnnnnnnnnnnnnnnnnnnnnnnnnnnnnnnnnnnnnnnnnnnnnnnnnnnnnnnnnnnnnnnnnnnnnnnnnnnnnnnnnnnnnnnnnnnnnnnnnnnnnnnnnnnnnnnnnnnnnnnnnnnnnnnnnnnnnnnnnnnnnnnnnnnnnnnnnnnnnnnnnnnnnnnnnnnnnnnnnnnnnnnnnnnnnnnnnnnnnnnnnnnnnnnnnnnnnnnnnnnnnnnnnnnnnnnnnnnnnnnnnnnnnnnnnnnnnnnnnnnnnnnnnnnnnnnnnnnnnnnnnnnnnnnnnnnnnnnnnnnnnnnnnnnnnnnnnnnnnnnnnnnnnnnnnnnnnnnnnnnnnnnnnnnnnnnnnnnnnnnnnnnnnnnnnnnnnnnnnnnnnnnnnnnnnnnnnnnnnnnnnnnnnnnnnnnnnnnnnnnnnnnnnnnnnnnnnnnnnnnnnnnnnnnnnnnnnnnnnnnnnnnnnnnnnnnnnnnnnnnnnnnnnnnnnnnnnnnnnnnnnnnnnnnnnnnnnnnnnnnnnnnnnnnnnnnnnnnnnnnnnnnnnnnnnnnnnnnnnnnnnnnnnnnnnnnnnnnnnnnnnnnnnnnnnnnnnnnnnnnnnnnnnnnnnnnnnnnnnnnnnnnnnnnnnnnnnnnnnnnnnnnnnnnnnnnnnnnnnnnnnnnnnnnnnnnnnnnnnnnnnnnnnnnnnnnnnnnnnnnnnnnnnnnnnnnnnnnnnnnnnnnnnnnnnnnnnnnnnnnnnnnnnnnnnnnnnnnnnnnnnnnnnnnnnnnnnnnnnnnnnnnnnnnnnnnnnnnnnnnnnnnnnnnnnnnnnnnnnnnnnnnnnnnnnnnnnnnnnnnnnnnnnnnnnnnnnnnnnnnnnnnnnnnnnnnnnnnnnnnnnnnnnnnnnnnnnnnnnnnnnnnnnnnnnnnnnnnnnnnnnnnnnnnnnnnnnnnnnnnnnnnnnnnnnnnnnnnnnnnnnnnnnnnnnnnnnnnnnnnnnnnnnnnnnnnnnnnnnnnnnnnnnnnnnnnnnnnnnnnnnnnnnnnnnnnnnnnnnnnnnnnnnnnnnnnnnnnnnnnnnnnnnnnnnnnnnnnnnnnnnnnnnnnnnnnnnnnnnnnnnnnnnnnnnnnnnnnnnnnnnnnnnnnnnnnnnnnnnnnnnnnnnnnnnnnnnnnnnnnnnnnnnnnnnnnnnnnnnnnnnnnnnnnnnnnnnnnnnnnnnnnnnnnnnnnnnnnnnnnnnnnnnnnnnnnnnnnnnnnnnnnnnnnnnnnnnnnnnnnnnnnnnnnnnnnnnnnnnnnnnnnnnnnnnnnnnnnnnnnnnnnnnnnnnnnnnnnnnnnnnnnnnnnnnnnnnnnnnnnnnnnnnnnnnnnnnnnnnnnnnnnnnnnnnnnnnnnnnnnnnnnnnnnnnnnnnnnnnnnnnnnnnnnnnnnnnnnnnnnnnnnnnnnnnnnnnnnnnnnnnnnnnnnnnnnnnnnnnnnnnnnnnnnnnnnnnnnnnnnnnnnnnnnnnnnnnnnnnnnnnnnnnnnnnnnnnnnnnnnnnnnnnnnnnnnnnnnnnnnnnnnnnnnnnnnnnnnnnnnnnnnnnnnnnnnnnnnnnnnnnnnnnnnnnnnnnnnnnnnnnnnnnnnnnnnnnnnnnnnnnnnnnnnnnnnnnnnnnnnnnnnnnnnnnnnnnnnnnnnnnnnnnnnnnnnnnnnnnnnnnnnnnnnnnnnnnnnnnnnnnnnnnnnnnnnnnnnnnnnnnnnnnnnnnnnnnnnnnnnnnnnnnnnnnnnnnnnnnnnnnnnnnnnnnnnnnnnnnnnnnnnnnnnnnnnnnnnnnnnnnnnnnnnnnnnnnnnnnnnnnnnnnnnnnnnnnnnnnnnnnnnnnnnnnnnnnnnnnnnnnnnnnnnnnnnnnnnnnnnnnnnnnnnnnnnnnnnnnnnnnnnnnnnnnnnnnnnnnnnnnnnnnnnnnnnnnnnnnnnnnnnnnnnnnnnnnnnnnnnnnnnnnnnnnnnnnnnnnnnnnnnnnnnnnnnnnnnnnnnnnnnnnnnnnnnnnnnnnnnnnnnnnnnnnnnnnnnnnnnnnnnnnnnnnnnnnnnnnnnnnnnnnnnnnnnnnnnnnnnnnnnnnnnnnnnnnnnnnnnnnnnnnnnnnnnnnnnnnnnnnnnnnnnnnnnnnnnnnnnnnnnnnnnnnnnnnnnnnnnnnnnnnnnnnnnnnnnnnnnnnnnnnnnnnnnnnnnnnnnnnnnnnnnnnnnnnnnnnnnnnnnnnnnnnnnnnnnnnnnnnnnnnnnnnnnnnnnnnnnnnnnnnnnnnnnnnnnnnnnnnnnnnnnnnnnnnnnnnnnnnnnnnnnnnnnnnnnnnnnnnnnnnnnnnnnnnnnnnnnnnnnnnnnnnnnnnnnnnnnnnnnnnnnnnnnnnnnnnnnnnnnnnnnnnnnnnnnnnnnnnnnnnnnnnnnnnnnnnnnnnnnnnnnnnnnnnnnnnnnnnnnnnnnnnnnnnnnnnnnnnnnnnnnnnnnnnnnnnnnnnnnnnnnnnnnnnnnnnnnnnnnnnnnnnnnnnnnnnnnnnnnnnnnnnnnnnnnnnnnnnnnnnnnnnnnnnnnnnnnnnnnnnnnnnnnnnnnnnnnnnnnnnnnnnnnnnnnnnnnnnnnnnnnnnnnnnnnnnnnnnnnnnnnnnnnnnnnnnnnnnnnnnnnnnnnnnnnnnnnnnnnnnnnnnnnnnnnnnnnnnnnnnnnnnnnnnnnnnnnnnnnnnnnnnnnnnnnnnnnnnnnnnnnnnnnnnnnnnnnnnnnnnnnnnnnnnnnnnnnnnnnnnnnnnnnnnnnnnnnnnnnnnnnnnnnnnnnnnnnnnnnnnnnnnnnnnnnnnnnnnnnnnnnnnnnnnnnnnnnnnnnnnnnnnnnnnnnnnnnnnnnnnnnnnnnnnnnnnnnnnnnnnnnnnnnnnnnnnnnnnnnnnnnnnnnnnnnnnnnnnnnnnnnnnnnnnnnnnnnnnnnnnnnnnnnnnnnnnnnnnnnnnnnnnnnnnnnnnnnnnnnnnnnnnnnnnnnnnnnnnnnnnnnnnnnnnnnnnnnnnnnnnnnnnnnnnnnnnnnnnnnnnnnnnnnnnnnnnnnnnnnnnnnnnnnnnnnnnnnnnnnnnnnnnnnnnnnnnnnnnnnnnnnnnnnnnnnnnnnnnnnnnnnnnnnnnnnnnnnnnnnnnnnnnnnnnnnnnnnnnnnnnnnnnnnnnnnnnnnnnnnnnnnnnnnnnnnnnnnnnnnnnnnnnnnnnnnnnnnnnnnnnnnnnnnnnnnnnnnnnnnnnnnnnnnnnnnnnnnnnnnnnnnnnnnnnnnnnnnnnnnnnnnnnnnnnnnnnnnnnnnnnnnnnnnnnnnnnnnnnnnnnnnnnnnnnnnnnnnnnnnnnnnnnnnnnnnnnnnnnnnnnnnnnnnnnnnnnnnnnnnnnnnnnnnnnnnnnnnnnnnnnnnnnnnnnnnnnnnnnnnnnnnnnnnnnnnnnnnnnnnnnnnnnnnnnnnnnnnnnnnnnnnnnnnnnnnnnnnnnnnnnnnnnnnnnnnnnnnnnnnnnnnnnnnnnnnnnnnnnnnnnnnnnnnnnnnnnnnnnnnnnnnnnnnnnnnnnnnnnnnnnnnnnnnnnnnnnnnnnnnnnnnnnnnnnnnnnnnnnnnnnnnnnnnnnnnnnnnnnnnnnnnnnnnnnnnnnnnnnnnnnnnnnnnnnnnnnnnnnnnnnnnnnnnnnnnnnnnnnnnnnnnnnnnnnnnnnnnnnnnnnnnnnnnnnnnnnnnnnnnnnnnnnnnnnnnnnnnnnnnnnnnnnnnnnnnnnnnnnnnnnnnnnnnnnnnnnnnnnnnnnnnnnnnnnnnnnnnnnnnnnnnnnnnnnnnnnnnnnnnnnnnnnnnnnnnnnnnnnnnnnnnnnnnnnnnnnnnnnnnnnnnnnnnnnnnnnnnnnnnnnnnnnnnnnnnnnnnnnnnnnnnnnnnnnnnnnnnnnnnnnnnnnnnnnnnnnnnnnnnnnnnnnnnnnnnnnnnnnnnnnnnnnnnnnnnnnnnnnnnnnnnnnnnnnnnnnnnnnnnnnnnnnnnnnnnnnnnnnnnnnnnnnnnnnnnnnnnnnnnnnnnnnnnnnnnnnnnnnnnnnnnnnnnnnnnnnnnnnnnnnnnnnnnnnnnnnnnnnnnnnnnnnnnnnnnnnnnnnnnnnnnnnnnnnnnnnnnnnnnnnnnnnnnnnnnnnnnnnnnnnnnnnnnnnnnnnnnnnnnnnnnnnnnnnnnnnnnnnnnnnnnnnnnnnnnnnnnnnnnnnnnnnnnnnnnnnnnnnnnnnnnnnnnnnnnnnnnnnnnnnnnnnnnnnnnnnnnnnnnnnnnnnnnnnnnnnnnnnnnnnnnnnnnnnnnnnnnnnnnnnnnnnnnnnnnnnnnnnnnnnnnnnnnnnnnnnnnnnnnnnnnnnnnnnnnnnnnnnnnnnnnnnnnnnnnnnnnnnnnnnnnnnnnnnnnnnnnnnnnnnnnnnnnnnnnnnnnnnnnnnnnnnnnnnnnnnnnnnnnnnnnnnnnnnnnnnnnnnnnnnnnnnnnnnnnnnnnnnnnnnnnnnnnnnnnnnnnnnnnnnnnnnnnnnnnnnnnnnnnnnnnnnnnnnnnnnnnnnnnnnnnnnnnnnnnnnnnnnnnnnnnnnnnnnnnnnnnnnnnnnnnnnnnnnnnnnnnnnnnnnnnnnnnnnnnnnnnnnnnnnnnnnnnnnnnnnnnnnnnnnnnnnnnnnnnnnnnnnnnnnnnnnnnnnnnnnnnnnnnnnnnnnnnnnnnnnnnnnnnnnnnnnnnnnnnnnnnnnnnnnnnnnnnnnnnnnnnnnnnnnnnnnnnnnnnnnnnnnnnnnnnnnnnnnnnnnnnnnnnnnnnnnnnnnnnnnnnnnnnnnnnnnnnnnnnnnnnnnnnnnnnnnnnnnnnnnnnnnnnnnnnnnnnnnnnnnnnnnnnnnnnnnnnnnnnnnnnnnnnnnnnnnnnnnnnnnnnnnnnnnnnnnnnnnnnnnnnnnnnnnnnnnnnnnnnnnnnnnnnnnnnnnnnnnnnnnnnnnnnnnnnnnnnnnnnnnnnnnnnnnnnnnnnnnnnnnnnnnnnnnnnnnnnnnnnnnnnnnnnnnnnnnnnnnnnnnnnnnnnnnnnnnnnnnnnnnnnnnnnnnnnnnnnnnnnnnnnnnnnnnnnnnnnnnnnnnnnnnnnnnnnnnnnnnnnnnnnnnnnnnnnnnnnnnnnnnnnnnnnnnnnnnnnnnnnnnnnnnnnnnnnnnnnnnnnnnnnnnnnnnnnnnnnnnnnnnnnnnnnnnnnnnnnnnnnnnnnnnnnnnnnnnnnnnnnnnnnnnnnnnnnnnnnnnnnnnnnnnnnnnnnnnnnnnnnnnnnnnnnnnnnnnnnnnnnnnnnnnnnnnnnnnnnnnnnnnnnnnnnnnnnnnnnnnnnnnnnnnnnnnnnnnnnnnnnnnnnnnnnnnnnnnnnnnnnnnnnnnnnnnnnnnnnnnnnnnnnnnnnnnnnnnnnnnnnnnnnnnnnnnnnnnnnnnnnnnnnnnnnnnnnnnnnnnnnnnnnnnnnnnnnnnnnnnnnnnnnnnnnnnnnnnnnnnnnnnnnnnnnnnnnnnnnnnnnnnnnnnnnnnnnnnnnnnnnnnnnnnnnnnnnnnnnnnnnnnnnnnnnnnnnnnnnnnnnnnnnnnnnnnnnnnnnnnnnnnnnnnnnnnnnnnnnnnnnnnnnnnnnnnnnnnnnnnnnnnnnnnnnnnnnnnnnnnnnnnnnnnnnnnnnnnnnnnnnnnnnnnnnnnnnnnnnnnnnnnnnnnnnnnnnnnnnnnnnnnnnnnnnnnnnnnnnnnnnnnnnnnnnnnnnnnnnnnnnnnnnnnnnnnnnnnnnnnnnnnnnnnnnnnnnnnnnnnnnnnnnnnnnnnnnnnnnnnnnnnnnnnnnnnnnnnnnnnnnnnnnnnnnnnnnnnnnnnnnnnnnnnnnnnnnnnnnnnnnnnnnnnnnnnnnnnnnnnnnnnnnnnnnnnnnnnnnnnnnnnnnnnnnnnnnnnnnnnnnnnnnnnnnnnnnnnnnnnnnnnnnnnnnnnnnnnnnnnnnnnnnnnnnnnnnnnnnnnnnnnnnnnnnnnnnnnnnnnnnnnnnnnnnnnnnnnnnnnnnnnnnnnnnnnnnnnnnnnnnnnnnnnnnnnnnnnnnnnnnnnnnnnnnnnnnnnnnnnnnnnnnnnnnnnnnnnnnnnnnnnnnnnnnnnnnnnnnnnnnnnnnnnnnnnnnnnnnnnnnnnnnnnnnnnnnnnnnnnnnnnnnnnnnnnnnnnnnnnnnnnnnnnnnnnnnnnnnnnnnnnnnnnnnnnnnnnnnnnnnnnnnnnnnnnnnnnnnnnnnnnnnnnnnnnnnnnnnnnnnnnnnnnnnnnnnnnnnnnnnnnnnnnnnnnnnnnnnnnnnnnnnnnnnnnnnnnnnnnnnnnnnnnnnnnnnnnnnnnnnnnnnnnnnnnnnnnnnnnnnnnnnnnnnnnnnnnnnnnnnnnnnnnnnnnnnnnnnnnnnnnnnnnnnnnnnnnnnnnnnnnnnnnnnnnnnnnnnnnnnnnnnnnnnnnnnnnnnnnnnnnnnnnnnnnnnnnnnnnnnnnnnnnnnnnnnnnnnnnnnnnnnnnnnnnnnnnnnnnnnnnnnnnnnnnnnnnnnnnnnnnnnnnnnnnnnnnnnnnnnnnnnnnnnnnnnnnnnnnnnnnnnnnnnnnnnnnnnnnnnnnnnnnnnnnnnnnnnnnnnnnnnnnnnnnnnnnnnnnnnnnnnnnnnnnnnnnnnnnnnnnnnnnnnnnnnnnnnnnnnnnnnnnnnnnnnnnnnnnnnnnnnnnnnnnnnnnnnnnnnnnnnnnnnnnnnnnnnnnnnnnnnnnnnnnnnnnnnnnnnnnnnnnnnnnnnnnnnnnnnnnnnnnnnnnnnnnnnnnnnnnnnnnnnnnnnnnnnnnnnnnnnnnnnnnnnnnnnnnnnnnnnnnnnnnnnnnnnnnnnnnnnnnnnnnnnnnnnnnnnnnnnnnnnnnnnnnnnnnnnnnnnnnnnnnnnnnnnnnnnnnnnnnnnnnnnnnnnnnnnnnnnnnnnnnnnnnnnnnnnnnnnnnnnnnnnnnnnnnnnnnnnnnnnnnnnnnnnnnnnnnnnnnnnnnnnnnnnnnnnnnnnnnnnnnnnnnnnnnnnnnnnnnnnnnnnnnnnnnnnnnnnnnnnnnnnnnnnnnnnnnnnnnnnnnnnnnnnnnnnnnnnnnnnnnnnnnnnnnnnnnnnnnnnnnnnnnnnnnnnnnnnnnnnnnnnnnnnnnnnnnnnnnnnnnnnnnnnnnnnnnnnnnnnnnnnnnnnnnnnnnnnnnnnnnnnnnnnnnnnnnnnnnnnnnnnnnnnnnnnnnnnnnnnnnnnnnnnnnnnnnnnnnnnnnnnnnnnnnnnnnnnnnnnnnnnnnnnnnnnnnnnnnnnnnnnnnnnnnnnnnnnnnnnnnnnnnnnnnnnnnnnnnnnnnnnnnnnnnnnnnnnnnnnnnnnnnnnnnnnnnnnnnnnnnnnnnnnnnnnnnnnnnnnnnnnnnnnnnnnnnnnnnnnnnnnnnnnnnnnnnnnnnnnnnnnnnnnnnnnnnnnnnnnnnnnnnnnnnnnnnnnnnnnnnnnnnnnnnnnnnnnnnnnnnnnnnnnnnnnnnnnnnnnnnnnnnnnnnnnnnnnnnnnnnnnnnnnnnnnnnnnnnnnnnnnnnnnnnnnnnnnnnnnnnnnnnnnnnnnnnnnnnnnnnnnnnnnnnnnnnnnnnnnnnnnnnnnnnnnnnnnnnnnnnnnnnnnnnnnnnnnnnnnnnnnnnnnnnnnnnnnnnnnnnnnnnnnnnnnnnnnnnnnnnnnnnnnnnnnnnnnnnnnnnnnnnnnnnnnnnnnnnnnnnnnnnnnnnnnnnnnnnnnnnnnnnnnnnnnnnnnnnnnnnnnnnnnnnnnnnnnnnnnnnnnnnnnnnnnnnnnnnnnnnnnnnnnnnnnnnnnnnnnnnnnnnnnnnnnnnnnnnnnnnnnnnnnnnnnnnnnnnnnnnnnnnnnnnnnnnnnnnnnnnnnnnnnnnnnnnnnnnnnnnnnnnnnnnnnnnnnnnnnnnnnnnnnnnnnnnnnnnnnnnnnnnnnnnnnnnnnnnnnnnnnnnnnnnnnnnnnnnnnnnnnnnnnnnnnnnnnnnnnnnnnnnnnnnnnnnnnnnnnnnnnnnnnnnnnnnnnnnnnnnnnnnnnnnnnnnnnnnnnnnnnnnnnnnnnnnnnnnnnnnnnnnnnnnnnnnnnnnnnnnnnnnnnnnnnnnnnnnnnnnnnnnnnnnnnnnnnnnnnnnnnnnnnnnnnnnnnnnnnnnnnnnnnnnnnnnnnnnnnnnnnnnnnnnnnnnnnnnnnnnnnnnnnnnnnnnnnnnnnnnnnnnnnnnnnnnnnnnnnnnnnnnnnnnnnnnnnnnnnnnnnnnnnnnnnnnnnnnnnnnnnnnnnnnnnnnnnnnnnnnnnnnnnnnnnnnnnnnnnnnnnnnnnnnnnnnnnnnnnnnnnnnnnnnnnnnnnnnnnnnnnnnnnnnnnnnnnnnnnnnnnnnnnnnnnnnnnnnnnnnnnnnnnnnnnnnnnnnnnnnnnnnnnnnnnnnnnnnnnnnnnnnnnnnnnnnnnnnnnnnnnnnnnnnnnnnnnnnnnnnnnnnnnnnnnnnnnnnnnnnnnnnnnnnnnnnnnnnnnnnnnnnnnnnnnnnnnnnnnnnnnnnnnnnnnnnnnnnnnnnnnnnnnnnnnnnnnnnnnnnnnnnnnnnnnnnnnnnnnnnnnnnnnnnnnnnnnnnnnnnnnnnnnnnnnnnnnnnnnnnnnnnnnnnnnnnnnnnnnnnnnnnnnnnnnnnnnnnnnnnnnnnnnnnnnnnnnnnnnnnnnnnnnnnnnnnnnnnnnnnnnnnnnnnnnnnnnnnnnnnnnnnnnnnnnnnnnnnnnnnnnnnnnnnnnnnnnnnnnnnnnnnnnnnnnnnnnnnnnnnnnnnnnnnnnnnnnnnnnnnnnnnnnnnnnnnnnnnnnnnnnnnnnnnnnnnnnnnnnnnnnnnnnnnnnnnnnnnnnnnnnnnnnnnnnnnnnnnnnnnnnnnnnnnnnnnnnnnnnnnnnnnnnnnnnnnnnnnnnnnnnnnnnnnnnnnnnnnnnnnnnnnnnnnnnnnnnnnnnnnnnnnnnnnnnnnnnnnnnnnnnnnnnnnnnnnnnnnnnnnnnnnnnnnnnnnnnnnnnnnnnnnnnnnnnnnnnnnnnnnnnnnnnnnnnnnnnnnnnnnnnnnnnnnnnnnnnnnnnnnnnnnnnnnnnnnnnnnnnnnnnnnnnnnnnnnnnnnnnnnnnnnnnnnnnnnnnnnnnnnnnnnnnnnnnnnnnnnnnnnnnnnnnnnnnnnnnnnnnnnnnnnnnnnnnnnnnnnnnnnnnnnnnnnnnnnnnnnnnnnnnnnnnnnnnnnnnnnnnnnnnnnnnnnnnnnnnnnnnnnnnnnnnnnnnnnnnnnnnnnnnnnnnnnnnnnnnnnnnnnnnnnnnnnnnnnnnnnnnnnnnnnnnnnnnnnnnnnnnnnnnnnnnnnnnnnnnnnnnnnnnnnnnnnnnnnnnnnnnnnnnnnnnnnnnnnnnnnnnnnnnnnnnnnnnnnnnnnnnnnnnnnnnnnnnnnnnnnnnnnnnnnnnnnnnnnnnnnnnnnnnnnnnnnnnnnnnnnnnnnnnnnnnnnnnnnnnnnnnnnnnnnnnnnnnnnnnnnnnnnnnnnnnnnnnnnnnnnnnnnnnnnnnnnnnnnnnnnnnnnnnnnnnnnnnnnnnnnnnnnnnnnnnnnnnnnnnnnnnnnnnnnnnnnnnnnnnnnnnnnnnnnnnnnnnnnnnnnnnnnnnnnnnnnnnnnnnnnnnnnnnnnnnnnnnnnnnnnnnnnnnnnnnnnnnnnnnnnnnnnnnnnnnnnnnnnnnnnnnnnnnnnnnnnnnnnnnnnnnnnnnnnnnnnnnnnnnnnnnnnnnnnnnnnnnnnnnnnnnnnnnnnnnnnnnnnnnnnnnnnnnnnnnnnnnnnnnnnnnnnnnnnnnnnnnnnnnnnnnnnnnnnnnnnnnnnnnnnnnnnnnnnnnnnnnnnnnnnnnnnnnnnnnnnnnnnnnnnnnnnnnnnnnnnnnnnnnnnnnnnnnnnnnnnnnnnnnnnnnnnnnnnnnnnnnnnnnnnnnnnnnnnnnnnnnnnnnnnnnnnnnnnnnnnnnnnnnnnnnnnnnnnnnnnnnnnnnnnnnnnnnnnnnnnnnnnnnnnnnnnnnnnnnnnnnnnnnnnnnnnnnnnnnnnnnnnnnnnnnnnnnnnnnnnnnnnnnnnnnnnnnnnnnnnnnnnnnnnnnnnnnnnnnnnnnnnnnnnnnnnnnnnnnnnnnnnnnnnnnnnnnnnnnnnnnnnnnnnnnnnnnnnnnnnnnnnnnnnnnnnnnnnnnnnnnnnnnnnnnnnnnnnnnnnnnnnnnnnnnnnnnnnnnnnnnnnnnnnnnnnnnnnnnnnnnnnnnnnnnnnnnnnnnnnnnnnnnnnnnnnnnnnnnnnnnnnnnnnnnnnnnnnnnnnnnnnnnnnnnnnnnnnnnnnnnnnnnnnnnnnnnnnnnnnnnnnnnnnnnnnnnnnnnnnnnnnnnnnnnnnnnnnnnnnnnnnnnnnnnnnnnnnnnnnnnnnnnnnnnnnnnnnnnnnnnnnnnnnnnnnnnnnnnnnnnnnnnnnnnnnnnnnnnnnnnnnnnnnnnnnnnnnnnnnnnnnnnnnnnnnnnnnnnnnnnnnnnnnnnnnnnnnnnnnnnnnnnnnnnnnnnnnnnnnnnnnnnnnnnnnnnnnnnnnnnnnnnnnnnnnnnnnnnnnnnnnnnnnnnnnnnnnnnnnnnnnnnnnnnnnnnnnnnnnnnnnnnnnnnnnnnnnnnnnnnnnnnnnnnnnnnnnnnnnnnnnnnnnnnnnnnnnnnnnnnnnnnnnnnnnnnnnnnnnnnnnnnnnnnnnnnnnnnnnnnnnnnnnnnnnnnnnnnnnnnnnnnnnnnnnnnnnnnnnnnnnnnnnnnnnnnnnnnnnnnnnnnnnnnnnnnnnnnnnnnnnnnnnnnnnnnnnnnnnnnnnnnnnnnnnnnnnnnnnnnnnnnnnnnnnnnnnnnnnnnnnnnnnnnnnnnnnnnnnnnnnnnnnnnnnnnnnnnnnnnnnnnnnnnnnnnnnnnnnnnnnnnnnnnnnnnnnnnnnnnnnnnnnnnnnnnnnnnnnnnnnnnnnnnnnnnnnnnnnnnnnnnnnnnnnnnnnnnnnnnnnnnnnnnnnnnnnnnnnnnnnnnnnnnnnnnnnnnnnnnnnnnnnnnnnnnnnnnnnnnnnnnnnnnnnnnnnnnnnnnnnnnnnnnnnnnnnnnnnnnnnnnnnnnnnnnnnnnnnnnnnnnnnnnnnnnnnnnnnnnnnnnnnnnnnnnnnnnnnnnnnnnnnnnnnnnnnnnnnnnnnnnnnnnnnnnnnnnnnnnnnnnnnnnnnnnnnnnnnnnnnnnnnnnnnnnnnnnnnnnnnnnnnnnnnnnnnnnnnnnnnnnnnnnnnnnnnnnnnnnnnnnnnnnnnnnnnnnnnnnnnnnnnnnnnnnnnnnnnnnnnnnnnnnnnnnnnnnnnnnnnnnnnnnnnnnnnnnnnnnnnnnnnnnnnnnnnnnnnnnnnnnnnnnnnnnnnnnnnnnnnnnnnnnnnnnnnnnnnnnnnnnnnnnnnnnnnnnnnnnnnnnnnnnnnnnnnnnnnnnnnnnnnnnnnnnnnnnnnnnnnnnnnnnnnnnnnnnnnnnnnnnnnnnnnnnnnnnnnnnnnnnnnnnnnnnnnnnnnnnnnnnnnnnnnnnnnnnnnnnnnnnnnnnnnnnnnnnnnnnnnnnnnnnnnnnnnnnnnnnnnnnnnnnnnnnnnnnnnnnnnnnnnnnnnnnnnnnnnnnnnnnnnnnnnnnnnnnnnnnnnnnnnnnnnnnnnnnnnnnnnnnnnnnnnnnnnnnnnnnnnnnnnnnnnnnnnnnnnnnnnnnnnnnnnnnnnnnnnnnnnnnnnnnnnnnnnnnnnnnnnnnnnnnnnnnnnnnnnnnnnnnnnnnnnnnnnnnnnnnnnnnnnnnnnnnnnnnnnnnnnnnnnnnnnnnnnnnnnnnnnnnnnnnnnnnnnnnnnnnnnnnnnnnnnnnnnnnnnnnnnnnnnnnnnnnnnnnnnnnnnnnnnnnnnnnnnnnnnnnnnnnnnnnnnnnnnnnnnnnnnnnnnnnnnnnnnnnnnnnnnnnnnnnnnnnnnnnnnnnnnnnnnnnnnnnnnnnnnnnnnnnnnnnnnnnnnnnnnnnnnnnnnnnnnnnnnnnnnnnnnnnnnnnnnnnnnnnnnnnnnnnnnnnnnnnnnnnnnnnnnnnnnnnnnnnnnnnnnnnnnnnnnnnnnnnnnnnnnnnnnnnnnnnnnnnnnnnnnnnnnnnnnnnnnnnnnnnnnnnnnnnnnnnnnnnnnnnnnnnnnnnnnnnnnnnnnnnnnnnnnnnnnnnnnnnnnnnnnnnnnnnnnnnnnnnnnnnnnnnnnnnnnnnnnnnnnnnnnnnnnnnnnnnnnnnnnnnnnnnnnnnnnnnnnnnnnnnnnnnnnnnnnnnnnnnnnnnnnnnnnnnnnnnnnnnnnnnnnnnnnnnnnnnnnnnnnnnnnnnnnnnnnnnnnnnnnnnnnnnnnnnnnnnnnnnnnnnnnnnnnnnnnnnnnnnnnnnnnnnnnnnnnnnnnnnnnnnnnnnnnnnnnnnnnnnnnnnnnnnnnnnnnnnnnnnnnnnnnnnnnnnnnnnnnnnnnnnnnnnnnnnnnnnnnnnnnnnnnnnnnnnnnnnnnnnnnnnnnnnnnnnnnnnnnnnnnnnnnnnnnnnnnnnnnnnnnnnnnnnnnnnnnnnnnnnnnnnnnnnnnnnnnnnnnnnnnnnnnnnnnnnnnnnnnnnnnnnnnnnnnnnnnnnnnnnnnnnnnnnnnnnnnnnnnnnnnnnnnnnnnnnnnnnnnnnnnnnnnnnnnnnnnnnnnnnnnnnnnnnnnnnnnnnnnnnnnnnnnnnnnnnnnnnnnnnnnnnnnnnnnnnnnnnnnnnnnnnnnnnnnnnnnnnnnnnnnnnnnnnnnnnnnnnnnnnnnnnnnnnnnnnnnnnnnnnnnnnnnnnnnnnnnnnnnnnnnnnnnnnnnnnnnnnnnnnnnnnnnnnnnnnnnnnnnnnnnnnnnnnnnnnnnnnnnnnnnnnnnnnnnnnnnnnnnnnnnnnnnnnnnnnnnnnnnnnnnnnnnnnnnnnnnnnnnnnnnnnnnnnnnnnnnnnnnnnnnnnnnnnnnnnnnnnnnnnnnnnnnnnnnnnnnnnnnnnnnnnnnnnnnnnnnnnnnnnnnnnnnnnnnnnnnnnnnnnnnnnnnnnnnnnnnnnnnnnnnnnnnnnnnnnnnnnnnnnnnnnnnnnnnnnnnnnnnnnnnnnnnnnnnnnnnnnnnnnnnnnnnnnnnnnnnnnnnnnnnnnnnnnnnnnnnnnnnnnnnnnnnnnnnnnnnnnnnnnnnnnnnnnnnnnnnnnnnnnnnnnnnnnnnnnnnnnnnnnnnnnnnnnnnnnnnnnnnnnnnnnnnnnnnnnnnnnnnnnnnnnnnnnnnnnnnnnnnnnnnnnnnnnnnnnnnnnnnnnnnnnnnnnnnnnnnnnnnnnnnnnnnnnnnnnnnnnnnnnnnnnnnnnnnnnnnnnnnnnnnnnnnnnnnnnnnnnnnnnnnnnnnnnnnnnnnnnnnnnnnnnnnnnnnnnnnnnnnnnnnnnnnnnnnnnnnnnnnnnnnnnnnnnnnnnnnnnnnnnnnnnnnnnnnnnnnnnnnnnnnnnnnnnnnnnnnnnnnnnnnnnnnnnnnnnnnnnnnnnnnnnnnnnnnnnnnnnnnnnnnnnnnnnnnnnnnnnnnnnnnnnnnnnnnnnnnnnnnnnnnnnnnnnnnnnnnnnnnnnnnnnnnnnnnnnnnnnnnnnnnnnnnnnnnnnnnnnnnnnnnnnnnnnnnnnnnnnnnnnnnnnnnnnnnnnnnnnnnnnnnnnnnnnnnnnnnnnnnnnnnnnnnnnnnnnnnnnnnnnnnnnnnnnnnnnnnnnnnnnnnnnnnnnnnnnnnnnnnnnnnnnnnnnnnnnnnnnnnnnnnnnnnnnnnnnnnnnnnnnnnnnnnnnnnnnnnnnnnnnnnnnnnnnnnnnnnnnnnnnnnnnnnnnnnnnnnnnnnnnnnnnnnnnnnnnnnnnnnnnnnnnnnnnnnnnnnnnnnnnnnnnnnnnnnnnnnnnnnnnnnnnnnnnnnnnnnnnnnnnnnnnnnnnnnnnnnnnnnnnnnnnnnnnnnnnnnnnnnnnnnnnnnnnnnnnnnnnnnnnnnnnnnnnnnnnnnnnnnnnnnnnnnnnnnnnnnnnnnnnnnnnnnnnnnnnnnnnnnnnnnnnnnnnnnnnnnnnnnnnnnnnnnnnnnnnnnnnnnnnnnnnnnnnnnnnnnnnnnnnnnnnnnnnnnnnnnnnnnnnnnnnnnnnnnnnnnnnnnnnnnnnnnnnnnnnnnnnnnnnnnnnnnnnnnnnnnnnnnnnnnnnnnnnnnnnnnnnnnnnnnnnnnnnnnnnnnnnnnnnnnnnnnnnnnnnnnnnnnnnnnnnnnnnnnnnnnnnnnnnnnnnnnnnnnnnnnnnnnnnnnnnnnnnnnnnnnnnnnnnnnnnnnnnnnnnnnnnnnnnnnnnnnnnnnnnnnnnnnnnnnnnnnnnnnnnnnnnnnnnnnnnnnnnnnnnnnnnnnnnnnnnnnnnnnnnnnnnnnnnnnnnnnnnnnnnnnnnnnnnnnnnnnnnnnnnnnnnnnnnnnnnnnnnnnnnnnnnnnnnnnnnnnnnnnnnnnnnnnnnnnnnnnnnnnnnnnnnnnnnnnnnnnnnnnnnnnnnnnnnnnnnnnnnnnnnnnnnnnnnnnnnnnnnnnnnnnnnnnnnnnnnnnnnnnnnnnnnnnnnnnnnnnnnnnnnnnnnnnnnnnnnnnnnnnnnnnnnnnnnnnnnnnnnnnnnnnnnnnnnnnnnnnnnnnnnnnnnnnnnnnnnnnnnnnnnnnnnnnnnnnnnnnnnnnnnnnnnnnnnnnnnnnnnnnnnnnnnnnnnnnnnnnnnnnnnnnnnnnnnnnnnnnnnnnnnnnnnnnnnnnnnnnnnnnnnnnnnnnnnnnnnnnnnnnnnnnnnnnnnnnnnnnnnnnnnnnnnnnnnnnnnnnnnnnnnnnnnnnnnnnnnnnnnnnnnnnnnnnnnnnnnnnnnnnnnnnnnnnnnnnnnnnnnnnnnnnnnnnnnnnnnnnnnnnnnnnnnnnnnnnnnnnnnnnnnnnnnnnnnnnnnnnnnnnnnnnnnnnnnnnnnnnnnnnnnnnnnnnnnnnnnnnnnnnnnnnnnnnnnnnnnnnnnnnnnnnnnnnnnnnnnnnnnnnnnnnnnnnnnnnnnnnnnnnnnnnnnnnnnnnnnnnnnnnnnnnnnnnnnnnnnnnnnnnnnnnnnnnnnnnnnnnnnnnnnnnnnnnnnnnnnnnnnnnnnnnnnnnnnnnnnnnnnnnnnnnnnnnnnnnnnnnnnnnnnnnnnnnnnnnnnnnnnnnnnnnnnnnnnnnnnnnnnnnnnnnnnnnnnnnnnnnnnnnnnnnnnnnnnnnnnnnnnnnnnnnnnnnnnnnnnnnnnnnnnnnnnnnnnnnnnnnnnnnnnnnnnnnnnnnnnnnnnnnnnnnnnnnnnnnnnnnnnnnnnnnnnnnnnnnnnnnnnnnnnnnnnnnnnnnnnnnnnnnnnnnnnnnnnnnnnnnnnnnnnnnnnnnnnnnnnnnnnnnnnnnnnnnnnnnnnnnnnnnnnnnnnnnnnnnnnnnnnnnnnnnnnnnnnnnnnnnnnnnnnnnnnnnnnnnnnnnnnnnnnnnnnnnnnnnnnnnnnnnnnnnnnnnnnnnnnnnnnnnnnnnnnnnnnnnnnnnnnnnnnnnnnnnnnnnnnnnnnnnnnnnnnnnnnnnnnnnnnnnnnnnnnnnnnnnnnnnnnnnnnnnnnnnnnnnnnnnnnnnnnnnnnnnnnnnnnnnnnnnnnnnnnnnnnnnnnnnnnnnnnnnnnnnnnnnnnnnnnnnnnnnnnnnnnnnnnnnnnnnnnnnnnnnnnnnnnnnnnnnnnnnnnnnnnnnnnnnnnnnnnnnnnnnnnnnnnnnnnnnnnnnnnnnnnnnnnnnnnnnnnnnnnnnnnnnnnnnnnnnnnnnnnnnnnnnnnnnnnnnnnnnnnnnnnnnnnnnnnnnnnnnnnnnnnnnnnnnnnnnnnnnnnnnnnnnnnnnnnnnnnnnnnnnnnnnnnnnnnnnnnnnnnnnnnnnnnnnnnnnnnnnnnnnnnnnnnnnnnnnnnnnnnnnnnnnnnnnnnnnnnnnnnnnnnnnnnnnnnnnnnnnnnnnnnnnnnnnnnnnnnnnnnnnnnnnnnnnnnnnnnnnnnnnnnnnnnnnnnnnnnnnnnnnnnnnnnnnnnnnnnnnnnnnnnnnnnnnnnnnnnnnnnnnnnnnnnnnnnnnnnnnnnnnnnnnnnnnnnnnnnnnnnnnnnnnnnnnnnnnnnnnnnnnnnnnnnnnnnnnnnnnnnnnnnnnnnnnnnnnnnnnnnnnnnnnnnnnnnnnnnnnnnnnnnnnnnnnnnnnnnnnnnnnnnnnnnnnnnnnnnnnnnnnnnnnnnnnnnnnnnnnnnnnnnnnnnnnnnnnnnnnnnnnnnnnnnnnnnnnnnnnnnnnnnnnnnnnnnnnnnnnnnnnnnnnnnnnnnnnnnnnnnnnnnnnnnnnnnnnnnnnnnnnnnnnnnnnnnnnnnnnnnnnnnnnnnnnnnnnnnnnnnnnnnnnnnnnnnnnnnnnnnnnnnnnnnnnnnnnnnnnnnnnnnnnnnnnnnnnnnnnnnnnnnnnnnnnnnnnnnnnnnnnnnnnnnnnnnnnnnnnnnnnnnnnnnnnnnnnnnnnnnnnnnnnnnnnnnnnnnnnnnnnnnnnnnnnnnnnnnnnnnnnnnnnnnnnnnnnnnnnnnnnnnnnnnnnnnnnnnnnnnnnnnnnnnnnnnnnnnnnnnnnnnnnnnnnnnnnnnnnnnnnnnnnnnnnnnnnnnnnnnnnnnnnnnnnnnnnnnnnnnnnnnnnnnnnnnnnnnnnnnnnnnnnnnnnnnnnnnnnnnnnnnnnnnnnnnnnnnnnnnnnnnnnnnnnnnnnnnnnnnnnnnnnnnnnnnnnnnnnnnnnnnnnnnnnnnnnnnnnnnnnnnnnnnnnnnnnnnnnnnnnnnnnnnnnnnnnnnnnnnnnnnnnnnnnnnnnnnnnnnnnnnnnnnnnnnnnnnnnnnnnnnnnnnnnnnnnnnnnnnnnnnnnnnnnnnnnnnnnnnnnnnnnnnnnnnnnnnnnnnnnnnnnnnnnnnnnnnnnnnnnnnnnnnnnnnnnnnnnnnnnnnnnnnnnnnnnnnnnnnnnnnnnnnnnnnnnnnnnnnnnnnnnnnnnnnnnnnnnnnnnnnnnnnnnnnnnnnnnnnnnnnnnnnnnnnnnnnnnnnnnnnnnnnnnnnnnnnnnnnnnnnnnnnnnnnnnnnnnnnnnnnnnnnnnnnnnnnnnnnnnnnnnnnnnnnnnnnnnnnnnnnnnnnnnnnnnnnnnnnnnnnnnnnnnnnnnnnnnnnnnnnnnnnnnnnnnnnnnnnnnnnnnnnnnnnnnnnnnnnnnnnnnnnnnnnnnnnnnnnnnnnnnnnnnnnnnnnnnnnnnnnnnnnnnnnnnnnnnnnnnnnnnnnnnnnnnnnnnnnnnnnnnnnnnnnnnnnnnnnnnnnnnnnnnnnnnnnnnnnnnnnnnnnnnnnnnnnnnnnnnnnnnnnnnnnnnnnnnnnnnnnnnnnnnnnnnnnnnnnnnnnnnnnnnnnnnnnnnnnnnnnnnnnnnnnnnnnnnnnnnnnnnnnnnnnnnnnnnnnnnnnnnnnnnnnnnnnnnnnnnnnnnnnnnnnnnnnnnnnnnnnnnnnnnnnnnnnnnnnnnnnnnnnnnnnnnnnnnnnnnnnnnnnnnnnnnnnnnnnnnnnnnnnnnnnnnnnnnnnnnnnnnnnnnnnnnnnnnnnnnnnnnnnnnnnnnnnnnnnnnnnnnnnnnnnnnnnnnnnnnnnnnnnnnnnnnnnnnnnnnnnnnnnnnnnnnnnnnnnnnnnnnnnnnnnnnnnnnnnnnnnnnnnnnnnnnnnnnnnnnnnnnnnnnnnnnnnnnnnnnnnnnnnnnnnnnnnnnnnnnnnnnnnnnnnnnnnnnnnnnnnnnnnnnnnnnnnnnnnnnnnnnnnnnnnnnnnnnnnnnnnnnnnnnnnnnnnnnnnnnnnnnnnnnnnnnnnnnnnnnnnnnnnnnnnnnnnnnnnnnnnnnnnnnnnnnnnnnnnnnnnnnnnnnnnnnnnnnnnnnnnnnnnnnnnnnnnnnnnnnnnnnnnnnnnnnnnnnnnnnnnnnnnnnnnnnnnnnnnnnnnnnnnnnnnnnnnnnnnnnnnnnnnnnnnnnnnnnnnnnnnnnnnnnnnnnnnnnnnnnnnnnnnnnnnnnnnnnnnnnnnnnnnnnnnnnnnnnnnnnnnnnnnnnnnnnnnnnnnnnnnnnnnnnnnnnnnnnnnnnnnnnnnnnnnnnnnnnnnnnnnnnnnnnnnnnnnnnnnnnnnnnnnnnnnnnnnnnnnnnnnnnnnnnnnnnnnnnnnnnnnnnnnnnnnnnnnnnnnnnnnnnnnnnnnnnnnnnnnnnnnnnnnnnnnnnnnnnnnnnnnnnnnnnnnnnnnnnnnnnnnnnnnnnnnnnnnnnnnnnnnnnnnnnnnnnnnnnnnnnnnnnnnnnnnnnnnnnnnnnnnnnnnnnnnnnnnnnnnnnnnnnnnnnnnnnnnnnnnnnnnnnnnnnnnnnnnnnnnnnnnnnnnnnnnnnnnnnnnnnnnnnnnnnnnnnnnnnnnnnnnnnnnnnnnnnnnnnnnnnnnnnnnnnnnnnnnnnnnnnnnnnnnnnnnnnnnnnnnnnnnnnnnnnnnnnnnnnnnnnnnnnnnnnnnnnnnnnnnnnnnnnnnnnnnnnnnnnnnnnnnnnnnnnnnnnnnnnnnnnnnnnnnnnnnnnnnnnnnnnnnnnnnnnnnnnnnnnnnnnnnnnnnnnnnnnnnnnnnnnnnnnnnnnnnnnnnnnnnnnnnnnnnnnnnnnnnnnnnnnnnnnnnnnnnnnnnnnnnnnnnnnnnnnnnnnnnnnnnnnnnnnnnnnnnnnnnnnnnnnnnnnnnnnnnnnnnnnnnnnnnnnnnnnnnnnnnnnnnnnnnnnnnnnnnnnnnnnnnnnnnnnnnnnnnnnnnnnnnnnnnnnnnnnnnnnnnnnnnnnnnnnnnnnnnnnnnnnnnnnnnnnnnnnnnnnnnnnnnnnnnnnnnnnnnnnnnnnnnnnnnnnnnnnnnnnnnnnnnnnnnnnnnnnnnnnnnnnnnnnnnnnnnnnnnnnnnnnnnnnnnnnnnnnnnnnnnnnnnnnnnnnnnnnnnnnnnnnnnnnnnnnnnnnnnnnnnnnnnnnnnnnnnnnnnnnnnnnnnnnnnnnnnnnnnnnnnnnnnnnnnnnnnnnnnnnnnnnnnnnnnnnnnnnnnnnnnnnnnnnnnnnnnnnnnnnnnnnnnnnnnnnnnnnnnnnnnnnnnnnnnnnnnnnnnnnnnnnnnnnnnnnnnnnnnnnnnnnnnnnnnnnnnnnnnnnnnnnnnnnnnnnnnnnnnnnnnnnnnnnnnnnnnnnnnnnnnnnnnnnnnnnnnnnnnnnnnnnnnnnnnnnnnnnnnnnnnnnnnnnnnnnnnnnnnnnnnnnnnnnnnnnnnnnnnnnnnnnnnnnnnnnnnnnnnnnnnnnnnnnnnnnnnnnnnnnnnnnnnnnnnnnnnnnnnnnnnnnnnnnnnnnnnnnnnnnnnnnnnnnnnnnnnnnnnnnnnnnnnnnnnnnnnnnnnnnnnnnnnnnnnnnnnnnnnnnnnnnnnnnnnnnnnnnnnnnnnnnnnnnnnnnnnnnnnnnnnnnnnnnnnnnnnnnnnnnnnnnnnnnnnnnnnnnnnnnnnnnnnnnnnnnnnnnnnnnnnnnnnnnnnnnnnnnnnnnnnnnnnnnnnnnnnnnnnnnnnnnnnnnnnnnnnnnnnnnnnnnnnnnnnnnnnnnnnnnnnnnnnnnnnnnnnnnnnnnnnnnnnnnnnnnnnnnnnnnnnnnnnnnnnnnnnnnnnnnnnnnnnnnnnnnnnnnnnnnnnnnnnnnnnnnnnnnnnnnnnnnnnnnnnnnnnnnnnnnnnnnnnnnnnnnnnnnnnnnnnnnnnnnnnnnnnnnnnnnnnnnnnnnnnnnnnnnnnnnnnnnnnnnnnnnnnnnnnnnnnnnnnnnnnnnnnnnnnnnnnnnnnnnnnnnnnnnnnnnnnnnnnnnnnnnnnnnnnnnnnnnnnnnnnnnnnnnnnnnnnnnnnnnnnnnnnnnnnnnnnnnnnnnnnnnnnnnnnnnnnnnnnnnnnnnnnnnnnnnnnnnnnnnnnnnnnnnnnnnnnnnnnnnnnnnnnnnnnnnnnnnnnnnnnnnnnnnnnnnnnnnnnnnnnnnnnnnnnnnnnnnnnnnnnnnnnnnnnnnnnnnnnnnnnnnnnnnnnnnnnnnnnnnnnnnnnnnnnnnnnnnnnnnnnnnnnnnnnnnnnnnnnnnnnnnnnnnnnnnnnnnnnnnnnnnnnnnnnnnnnnnnnnnnnnnnnnnnnnnnnnnnnnnnnnnnnnnnnnnnnnnnnnnnnnnnnnnnnnnnnnnnnnnnnnnnnnnnnnnnnnnnnnnnnnnnnnnnnnnnnnnnnnnnnnnnnnnnnnnnnnnnnnnnnnnnnnnnnnnnnnnnnnnnnnnnnnnnnnnnnnnnnnnnnnnnnnnnnnnnnnnnnnnnnnnnnnnnnnnnnnnnnnnnnnnnnnnnnnnnnnnnnnnnnnnnnnnnnnnnnnnnnnnnnnnnnnnnnnnnnnnnnnnnnnnnnnnnnnnnnnnnnnnnnnnnnnnnnnnnnnnnnnnnnnnnnnnnnnnnnnnnnnnnnnnnnnnnnnnnnnnnnnnnnnnnnnnnnnnnnnnnnnnnnnnnnnnnnnnnnnnnnnnnnnnnnnnnnnnnnnnnnnnnnnnnnnnnnnnnnnnnnnnnnnnnnnnnnnnnnnnnnnnnnnnnnnnnnnnnnnnnnnnnnnnnnnnnnnnnnnnnnnnnnnnnnnnnnnnnnnnnnnnnnnnnnnnnnnnnnnnnnnnnnnnnnnnnnnnnnnnnnnnnnnnnnnnnnnnnnnnnnnnnnnnnnnnnnnnnnnnnnnnnnnnnnnnnnnnnnnnnnnnnnnnnnnnnnnnnnnnnnnnnnnnnnnnnnnnnnnnnnnnnnnnnnnnnnnnnnnnnnnnnnnnnnnnnnnnnnnnnnnnnnnnnnnnnnnnnnnnnnnnnnnnnnnnnnnnnnnnnnnnnnnnnnnnnnnnnnnnnnnnnnnnnnnnnnnnnnnnnnnnnnnnnnnnnnnnnnnnnnnnnnnnnnnnnnnnnnnnnnnnnnnnnnnnnnnnnnnnnnnnnnnnnnnnnnnnnnnnnnnnnnnnnnnnnnnnnnnnnnnnnnnnnnnnnnnnnnnnnnnnnnnnnnnnnnnnnnnnnnnnnnnnnnnnnnnnnnnnnnnnnnnnnnnnnnnnnnnnnnnnnnnnnnnnnnnnnnnnnnnnnnnnnnnnnnnnnnnnnnnnnnnnnnnnnnnnnnnnnnnnnnnnnnnnnnnnnnnnnnnnnnnnnnnnnnnnnnnnnnnnnnnnnnnnnnnnnnnnnnnnnnnnnnnnnnnnnnnnnnnnnnnnnnnnnnnnnnnnnnnnnnnnnnnnnnnnnnnnnnnnnnnnnnnnnnnnnnnnnnnnnnnnnnnnnnnnnnnnnnnnnnnnnnnnnnnnnnnnnnnnnnnnnnnnnnnnnnnnnnnnnnnnnnnnnnnnnnnnnnnnnnnnnnnnnnnnnnnnnnnnnnnnnnnnnnnnnnnnnnnnnnnnnnnnnnnnnnnnnnnnnnnnnnnnnnnnnnnnnnnnnnnnnnnnnnnnnnnnnnnnnnnnnnnnnnnnnnnnnnnnnnnnnnnnnnnnnnnnnnnnnnnnnnnnnnnnnnnnnnnnnnnnnnnnnnnnnnnnnnnnnnnnnnnnnnnnnnnnnnnnnnnnnnnnnnnnnnnnnnnnnnnnnnnnnnnnnnnnnnnnnnnnnnnnnnnnnnnnnnnnnnnnnnnnnnnnnnnnnnnnnnnnnnnnnnnnnnnnnnnnnnnnnnnnnnnnnnnnnnnnnnnnnnnnnnnnnnnnnnnnnnnnnnnnnnnnnnnnnnnnnnnnnnnnnnnnnnnnnnnnnnnnnnnnnnnnnnnnnnnnnnnnnnnnnnnnnnnnnnnnnnnnnnnnnnnnnnnnnnnnnnnnnnnnnnnnnnnnnnnnnnnnnnnnnnnnnnnnnnnnnnnnnnnnnnnnnnnnnnnnnnnnnnnnnnnnnnnnnnnnnnnnnnnnnnnnnnnnnnnnnnnnnnnnnnnnnnnnnnnnnnnnnnnnnnnnnnnnnnnnnnnnnnnnnnnnnnnnnnnnnnnnnnnnnnnnnnnnnnnnnnnnnnnnnnnnnnnnnnnnnnnnnnnnnnnnnnnnnnnnnnnnnnnnnnnnnnnnnnnnnnnnnnnnnnnnnnnnnnnnnnnnnnnnnnnnnnnnnnnnnnnnnnnnnnnnnnnnnnnnnnnnnnnnnnnnnnnnnnnnnnnnnnnnnnnnnnnnnnnnnnnnnnnnnnnnnnnnnnnnnnnnnnnnnnnnnnnnnnnnnnnnnnnnnnnnnnnnnnnnnnnnnnnnnnnnnnnnnnnnnnnnnnnnnnnnnnnnnnnnnnnnnnnnnnnnnnnnnnnnnnnnnnnnnnnnnnnnnnnnnnnnnnnnnnnnnnnnnnnnnnnnnnnnnnnnnnnnnnnnnnnnnnnnnnnnnnnnnnnnnnnnnnnnnnnnnnnnnnnnnnnnnnnnnnnnnnnnnnnnnnnnnnnnnnnnnnnnnnnnnnnnnnnnnnnnnnnnnnnnnnnnnnnnnnnnnnnnnnnnnnnnnnnnnnnnnnnnnnnnnnnnnnnnnnnnnnnnnnnnnnnnnnnnnnnnnnnnnnnnnnnnnnnnnnnnnnnnnnnnnnnnnnnnnnnnnnnnnnnnnnnnnnnnnnnnnnnnnnnnnnnnnnnnnnnnnnnnnnnnnnnnnnnnnnnnnnnnnnnnnnnnnnnnnnnnnnnnnnnnnnnnnnnnnnnnnnnnnnnnnnnnnnnnnnnnnnnnnnnnnnnnnnnnnnnnnnnnnnnnnnnnnnnnnnnnnnnnnnnnnnnnnnnnnnnnnnnnnnnnnnnnnnnnnnnnnnnnnnnnnnnnnnnnnnnnnnnnnnnnnnnnnnnnnnnnnnnnnnnnnnnnnnnnnnnnnnnnnnnnnnnnnnnnnnnnnnnnnnnnnnnnnnnnnnnnnnnnnnnnnnnnnnnnnnnnnnnnnnnnnnnnnnnnnnnnnnnnnnnnnnnnnnnnnnnnnnnnnnnnnnnnnnnnnnnnnnnnnnnnnnnnnnnnnnnnnnnnnnnnnnnnnnnnnnnnnnnnnnnnnnnnnnnnnnnnnnnnnnnnnnnnnnnnnnnnnnnnnnnnnnnnnnnnnnnnnnnnnnnnnnnnnnnnnnnnnnnnnnnnnnnnnnnnnnnnnnnnnnnnnnnnnnnnnnnnnnnnnnnnnnnnnnnnnnnnnnnnnnnnnnnnnnnnnnnnnnnnnnnnnnnnnnnnnnnnnnnnnnnnnnnnnnnnnnnnnnnnnnnnnnnnnnnnnnnnnnnnnnnnnnnnnnnnnnnnnnnnnnnnnnnnnnnnnnnnnnnnnnnnnnnnnnnnnnnnnnnnnnnnnnnnnnnnnnnnnnnnnnnnnnnnnnnnnnnnnnnnnnnnnnnnnnnnnnnnnnnnnnnnnnnnnnnnnnnnnnnnnnnnnnnnnnnnnnnnnnnnnnnnnnnnnnnnnnnnnnnnnnnnnnnnnnnnnnnnnnnnnnnnnnnnnnnnnnnnnnnnnnnnnnnnnnnnnnnnnnnnnnnnnnnnnnnnnnnnnnnnnnnnnnnnnnnnnnnnnnnnnnnnnnnnnnnnnnnnnnnnnnnnnnnnnnnnnnnnnnnnnnnnnnnnnnnnnnnnnnnnnnnnnnnnnnnnnnnnnnnnnnnnnnnnnnnnnnnnnnnnnnnnnnnnnnnnnnnnnnnnnnnnnnnnnnnnnnnnnnnnnnnnnnnnnnnnnnnnnnnnnnnnnnnnnnnnnnnnnnnnnnnnnnnnnnnnnnnnnnnnnnnnnnnnnnnnnnnnnnnnnnnnnnnnnnnnnnnnnnnnnnnnnnnnnnnnnnnnnnnnnnnnnnnnnnnnnnnnnnnnnnnnnnnnnnnnnnnnnnnnnnnnnnnnnnnnnnnnnnnnnnnnnnnnnnnnnnnnnnnnnnnnnnnnnnnnnnnnnnnnnnnnnnnnnnnnnnnnnnnnnnnnnnnnnnnnnnnnnnnnnnnnnnnnnnnnnnnnnnnnnnnnnnnnnnnnnnnnnnnnnnnnnnnnnnnnnnnnnnnnnnnnnnnnnnnnnnnnnnnnnnnnnnnnnnnnnnnnnnnnnnnnnnnnnnnnnnnnnnnnnnnnnnnnnnnnnnnnnnnnnnnnnnnnnnnnnnnnnnnnnnnnnnnnnnnnnnnnnnnnnnnnnnnnnnnnnnnnnnnnnnnnnnnnnnnnnnnnnnnnnnnnnnnnnnnnnnnnnnnnnnnnnnnnnnnnnnnnnnnnnnnnnnnnnnnnnnnnnnnnnnnnnnnnnnnnnnnnnnnnnnnnnnnnnnnnnnnnnnnnnnnnnnnnnnnnnnnnnnnnnnnnnnnnnnnnnnnnnnnnnnnnnnnnnnnnnnnnnnnnnnnnnnnnnnnnnnnnnnnnnnnnnnnnnnnnnnnnnnnnnnnnnnnnnnnnnnnnnnnnnnnnnnnnnnnnnnnnnnnnnnnnnnnnnnnnnnnnnnnnnnnnnnnnnnnnnnnnnnnnnnnnnnnnnnnnnnnnnnnnnnnnnnnnnnnnnnnnnnnnnnnnnnnnnnnnnnnnnnnnnnnnnnnnnnnnnnnnnnnnnnnnnnnnnnnnnnnnnnnnnnnnnnnnnnnnnnnnnnnnnnnnnnnnnnnnnnnnnnnnnnnnnnnnnnnnnnnnnnnnnnnnnnnnnnnnnnnnnnnnnnnnnnnnnnnnnnnnnnnnnnnnnnnnnnnnnnnnnnnnnnnnnnnnnnnnnnnnnnnnnnnnnnnnnnnnnnnnnnnnnnnnnnnnnnnnnnnnnnnnnnnnnnnnnnnnnnnnnnnnnnnnnnnnnnnnnnnnnnnnnnnnnnnnnnnnnnnnnnnnnnnnnnnnnnnnnnnnnnnnnnnnnnnnnnnnnnnnnnnnnnnnnnnnnnnnnnnnnnnnnnnnnnnnnnnnnnnnnnnnnnnnnnnnnnnnnnnnnnnnnnnnnnnnnnnnnnnnnnnnnnnnnnnnnnnnnnnnnnnnnnnnnnnnnnnnnnnnnnnnnnnnnnnnnnnnnnnnnnnnnnnnnnnnnnnnnnnnnnnnnnnnnnnnnnnnnnnnnnnnnnnnnnnnnnnnnnnnnnnnnnnnnnnnnnnnnnnnnnnnnnnnnnnnnnnnnnnnnnnnnnnnnnnnnnnnnnnnnnnnnnnnnnnnnnnnnnnnnnnnnnnnnnnnnnnnnnnnnnnnnnnnnnnnnnnnnnnnnnnnnnnnnnnnnnnnnnnnnnnnnnnnnnnnnnnnnnnnnnnnnnnnnnnnnnnnnnnnnnnnnnnnnnnnnnnnnnnnnnnnnnnnnnnnnnnnnnnnnnnnnnnnnnnnnnnnnnnnnnnnnnnnnnnnnnnnnnnnnnnnnnnnnnnnnnnnnnnnnnnnnnnnnnnnnnnnnnnnnnnnnnnnnnnnnnnnnnnnnnnnnnnnnnnnnnnnnnnnnnnnnnnnnnnnnnnnnnnnnnnnnnnnnnnnnnnnnnnnnnnnnnnnnnnnnnnnnnnnnnnnnnnnnnnnnnnnnnnnnnnnnnnnnnnnnnnnnnnnnnnnnnnnnnnnnnnnnnnnnnnnnnnnnnnnnnnnnnnnnnnnnnnnnnnnnnnnnnnnnnnnnnnnnnnnnnnnnnnnnnnnnnnnnnnnnnnnnnnnnnnnnnnnnnnnnnnnnnnnnnnnnnnnnnnnnnnnnnnnnnnnnnnnnnnnnnnnnnnnnnnnnnnnnnnnnnnnnnnnnnnnnnnnnnnnnnnnnnnnnnnnnnnnnnnnnnnnnnnnnnnnnnnnnnnnnnnnnnnnnnnnnnnnnnnnnnnnnnnnnnnnnnnnnnnnnnnnnnnnnnnnnnnnnnnnnnnnnnnnnnnnnnnnnnnnnnnnnnnnnnnnnnnnnnnnnnnnnnnnnnnnnnnnnnnnnnnnnnnnnnnnnnnnnnnnnnnnnnnnnnnnnnnnnnnnnnnnnnnnnnnnnnnnnnnnnnnnnnnnnnnnnnnnnnnnnnnnnnnnnnnnnnnnngattcgaacccccgagcccctttcggggctaacggttttcaagaccgccggtttcaaccactcacccatccctccgggaagtccacttcaacggtatgaagcaatcggctttattttagcagaacaagcgccggctgaagaaccggttgcggagccttttgccccggggtcgaacttgggggagcgtgctcgcatgaaattcaccaaacatcagtattctcggccgaaggatggcttgttcgttaaagccttccacaaaaaaccccctgcatttctcgaaaaattttcgtaaaatgtgaagccttccggtgaacctccggcaaagaggaggggggcatgagctacaacctacttgaggaagattggattccagttctatggaagactggaaagctcactcgcgtcaacctcattcaggtgctcactgaagcacactgcatccgccagattgccgccaccaatcccatggaccgcgtggccaccctgcgttttctgctcgcactgctttattggtgcgtaggggatccaccgcgcgatccaacctcgggtggcaccttttccgaagcatggtttaccaaactctatgaaaacaaggaatgcttcaatttgctgggagacggaatccggttctatcagtaccgtccaggctcgggaaaagacaaaaagctttccgtcaactatctcattcatgaagtgccgacggggtccaatgtacggcatttccggcattccgcggacggagttaacggcctttgtcgggcgtgttgtgccacagggttgttgcggctacctgtattcaccacccaaggggggaaaggaaaatcaccaggcatcaatggcaaaccccccgtctacgtcatacctctcggacgatccctgtgtgagaccttgtggctctcttggcgaccacagtcgaatttgggtacgcctgcatgggagaagcctgacatggcactgcccaagactggcgaagtccccctcctgaccgggctcacatggctgccgcgacgcgtttggctggacgaccccatggaacccgaagtcccttgtatttgttgcgggcgaaaagagcttctgattcggcagtgcatatttgccggcatcggtagcggcaaggcggatggccgagtttggaacgacccgcacgtcgttcgtgacaaaaatgtggtgatgacaccaagtaatgcccttgccgattccgataaagcggctgacgattgggcaaagataactgcggcgatcctcatcgataccaagcacacttccagacgccgattctgggttgttggtttcgcaagtaaacaggacaagtacctggaagcgaaggaatttgagattttccttcaacctaccacggaaagtgctcagattcaagatgccatcaaggagatcgagagatggcaaagagaagcagcggggctggcaaaaagagttgtcagagtggtgaagaacaagaaatcctcgcgaaaacatgttgagatcgacgccctggtaaaagccattcggcctcatatcgaagccagtgcctctgtgaaattgaaccgcctcatttccgacggccacccggcatgggagggggcggccaactactatgaagggatgatggttgccatctctagatcaatttctccggattttacggccacagcgctacgacagcggcaggaaattgcgcgcgttaaaccagacatgcggttaaaaacagagaaggcagggaatctgaccgcaagagaggcgataagtgactccaacagaacagtacatcaaacgcctgacacacctgaagaccggtgacctcggattgctgcgcacccacgcggggcaggagctcgatgagaaggtagagggcttcgacctgtttacgggcctatggtggccgctgcgtcaaaggaactcgcgggcaccccgccgtgacgtggcatggctcgtcgccaagctctatgccttccggccactcgagtattcggcggaagagacgctagctttccttcttgggcaatgccaaccagaagttggcaagcgggagaagttcatccagcggtttgataggatgctgactctgcccatccgcaaaatcgaacctgcgttgcaatgggcgcttgacgtgctcaattcaaagggcatgggactcgactggataaaactcacggatgatctttcggtttgggaacgagaatccacccgtctcgaatgggcaaaggaatttttgaagtctctaggaggaggataaatgctgatccagattcacgctattcaaaatcacgctccggccaatttgaaccgagatgacttgggcgcgcccaaagcctgctatttcggcggtgtgctgcgctcgcgcatctccagccaatgcctcaagcgcagcatccgtagaagcgacgagttcaggcagttgctaggcggtgttcgtacgcggcaattagcgaaattgatagctgacaagattcccgagaaagatgtgaggaagcgtgcggagaagattcttgaaatatgcggattcaagccctggagatcggaaggcgagtccgaaaattctgagaagagcaaaatgcttgtctatactaccaaacaggctgttgaagagatggcgaacctcctccgaaacagcgatggaaaggctgagagtgaactggcggaggggttcgccggacttattgcggagcgcacggcagttccggacatggccttgtcgggccgcatgctggagccggacaaatcttctacggtttgggagaagcgtgatactaaggtggaagcagcacttcaagtggcccatgcaatctccacccatgaggcccgccccgaggtggattactacgtcgctgccgatgacatccccggcgaggacgcgggtgccggctttgtggacgaggctatgtttgcctcggcctgtttttacaaatatttctcaatccactgggagcaattggtgaaaaacctcatggggtttggggaagaacatgaaaagctggccgcacatacggtgggcgcattcattcggggggctgcgatggtgaaccccactggaaaacagaacagtttcgccgcgcataatcctcccgatggcatgctggttgagatcagggacacccctctcagctacgccaacgcttttgcgaaacccgcggttgctcagggtgaacgtgacctcatcgcccagagcatcgcgcagcttggccaatacatccacgacatggacaccgggtacggtaagccaacggagcgattctggttctcgcctaattcccgccatcctctgctggcttacatcgaggaagaacaagatggaaaaaagaaacgacgtgagattgcgcttaccgacaataatctcagttcgctcgatatcttaattcaaaaggtcatcgagaaaatcggccacaattggcatgaggttcagaaaattactgtgaacgcagaggtggtttgatgagggccaacaccttatttcttcgcttggagggtcttcttcaagcctggggagaccaccagtcaaagtttgtcatccgacggacggcggaagctccgaccaagtctggcgttgtcgggatgctgtgcgccgccctgggggttagcagatgtaaagcctctaatgaatggcttcgaaagctgggctcgctttgtatgggggcgcgcattgatgcgccgggtgtccgctggtgggactatcagacggtcggagccaaggtcggaatacccagggcagatggtgctggcgctaagagaacggccgcgacgggggaaattgaaactctcatcacgcgtcgcgaatatctctgcgacgcatccttcctgatcgctttgcagggtgaggccgacctgatagcgcagttggagaccgcagtaggagcgcccaagtggacgctctatcttggtagaaaatgctgccctccgtcacgccctttgctggaaaaacccgcaagcggtgagtttcccgatttactctcagcccttaagtcgattccttggcgcaaacggatgaaggaggatcaaccgcccaaaacggttgactgcctgctcgattggcagcccacggcagatcagcctgaagcgcctgatgatgccttcgtctggtatgatgtgccccgcacctttgaaccaccctcgcacgaaccccgattcgtgctccggcgtcaattgccagtggccatcgagggcggcgtgggcgtcgcaggccagccggcgcagaccgaaactccgccgccgccccgcccgcgggccgattacaccaactccgcctacaggaacaagcgcctggagcggcttgcccgcgaccagcagctttgcgttttttgcaaggcgccagccacaacggtacaacacatcacctatcggcgcgccggaggcaatgaaagcttggaagatctgcgttcgctctgccgtttgtgtcatgacgccgtgaccatgatcgagtatggtttaaacatgggtctggatcggatcaatcccgaagagccacgttggcgcgaccagattattgccaagcggaacgagatcatcgccttccgctcgctcgaaacgcgtcggcgacgcctcgctccagaggaggtggaatagccatgtggatttcgtgtctcctgatcgacgtcggtgacaatcccgaccgcccccgccccgggcgccaatggctgcgaaacctctatcgcgttcaccagcgcctttgcatggcgtttccctccgaccgcagaaagcagtacgacccagagtttttaaagccctaccagccagaggattttgggaacggccatgttcatgttgagcgcgggccgaccgctggctttctcttccgccttgatcccgaggaacgatgttgccgcgaagcatcacaggctcggcattccggcagtcgggtggtaattctggtacagtctgcaccaaaacctgactgggaatacgcctttcacaacgcctgttatctgctggccgccccgccggaagtaaagccattcaacccgtgctacacaacgggtcagcggcttcgattccgcctccttgcgaatcctacccgccgcctcacggaacactcgcttggagccgacggacagctcgtcaagaaatgggcgaatacggataagaaagggatgcgcgtgcctgtgccgacggatcaactcctcgattggatcaatcggcgagctgaaaaggcggggttttctatcgagaaggattccatcaatgttttgccgggttatgtgttcgccaacaaaagaggggacaggcatggaattcgcctgcgctctgtccgttatgacgggcttctcagcgttaccgagcccgcactgtttcggcaagcgattatacaaggcatcgggccaggcaaagctttcggcttcgggctgctttcggtagcgccgtgttgtaccggaggtctatgaccgccatttttgacctcctgccccgtttgattctttacagtggagaccacaccatcgccacacttaccactaccgggcccttcctcagcgaagagggtaattccccgccttggttaaggaggggataaggggtggttggtgtaaagaacgggctgagagaggacgccagccgcctcgatcatcgatggggcgcagctacaaaaacatgaaagacctccatctgttgcccaaagtccgcgatagttccagtttcctttacgtcgagcattgcaagatcgaccaggagggcaaagcgatcgccattcacgacgcgaagggccgagtgccagtaccctgcgcgtcattgctggtgctgatgctcggtcccggcaccagcatcacgcacgcggctgtgcgatctcttgctgacaatggctgcaccatcctctggacgggcgaagagggcgtccgaacctacgctcagggcatgggagaaacgcgctcttccgaacgcctgctgcatcagtcacgcctctgctctgcgcccgaattgcgcttcatagtggttaaaaggctttacaagatgcgtttcccggagaagctggacccctccctgaccatccagcaattgcgcggcatggagggtgtccgggtgcgcgacgcatacttccgcgccagccgcgaggcgggcattccgtggtccggccgatcctacaaaaccgataactggcaggccgccgatgccgtcaatcgcgccctttcggtggccaacagttgcctctacggcgtctgccacgccgccattgtttccgtcggttattcaccggccttgggatttattcacaccggaaagatgctctcctttgtctacgatgttgccgacctgtataaaaccgaagtcaccattcccctcgcctttcgggccgcagccgaaggaatgggctttcaggaaagccacgtaagaaggaaatgtcgcgacgcgtttgtggaaagccgcttattacagagaattatccccgatatcgaccgcgctctcgattggggttcttcggaaggtgggcagggggatgccagactggatgcccaaccagcggctccagggtggctctgggatcccgaagtgggggcggtggagggaggcatcaaccgcggagatgatgctgaaggaggtgacaagccacggtcgtgatggtgctcgaaaatgcccctcccagcgtgcgcggggaactgacacgatggatgctggaattgcatgctggcgtttttgtgggaaacatttccgcgctggtgcgggaaaagctctggcaggaagtctgccgcaaattggcgggtggggctggaattctggtctacaatgctgccaacgagcaggggtttgatatccgcttttggggatcgccctctcggcgggtcgaaaacttcgagggacttcttctagttcgcgggccataagccctttaaatcgcagcgtcgtccccacgcgtgtgggggtgaaccgttcatcggcgcccggccaatcaagattacgcggtcgtccccacgcgtgtgggggtgaaccatgatctgaatcgcttccgtaatcggccttcttgtcgtccccacgcgtgtgggggtgaaccgccccgcggacggccaacgaagggcgtgagacagtcgtccccacgcgtgtgggggtgaaccgcttcgccgttccgcgagactgcaggcttggatgtcgtccccacgcgtgtgggggtgaaccgcttaaccctatcccctatcccaaacccttcccgtcgtccccacgcgtgtgggggtgaaccgacaactcgcgcgataacagccagttacggaccgtcgtccccacgcgtgtgggggtgaaccgtccccaacgacggggacaatctgcgggaagctgtcgtccccacgcgtgtgggggtgaaccgtgtccggtttgtgccaaaattttaagcaaggcgtcgtccccacgcgtgtgggggtgaaccgtccgtgtggaacgttgtcatggtacttcgttcgtcgtccccacgcgtgtgggggtgaaccgctgccgctgaaggatgggatttggcagcggtcgtcgtccccacgcgtgtgggggtgaaccgcgccatgttggggtgggatgtgtcgtaggcccgtcgtccccacgcgtgtgggggtgaaccggacgccagcctcgatgagaaaaccatcaccgcgtcgtccccacgcgtgtgggggtgaaccgctggctgcggtgcttgaggccaatgtcacactgtcgtccccacgcgtgtgggggtgaaccgcctccctcttttccaccgaccttcccgcctgcgtcgtccccacgcgtgtgggggtgaaccgattctggctggattaaaagcagcggaccggcagtcgtccccacgcgtgtgggggtgaaccgcgtaccatgaatctgacaaaccctttcctgacgtcgtccccacgcgtgtgggggtgaaccgtcttgacttggagtgatcagggtgatatggaagtcgtccccacgcgtgtgggggtgaaccgtcttgacttggagtgatcagggtgatatggaagtcgtccccacgcgtgtgggggtgaaccgcgatgcgagagtttgaagaaaagaccaatgccgtcgtccccacgcgtgtgggggtgaaccgaaggagctgctggccgatgctgacggcgaaccgtcgtccccacgcgtgtgggggtgaaccgatcctcgcgagtgtgttagtccgttctgtggcagtcgtccccacgcgtgtgggggtgaaccgatgtgcccgcgaagctcctgatgacgcgcgacgtcgtccccacgcgtgtgggggtgaaccgagcaagaaaattggcactcttgaagagctaacgtcgtccccacgcgtgtgggggtgaaccgttggcgcggagaatcttttctcggtccgtaaagtcgtccccacgcgtgtgggggtgaaccgataatgccgcccgactttcaggaggtgcggatgtcgtccccacgcgtgtgggggtgaaccgctgaaggaattgaaagacgaaaaatcgctgaggccatcccccgcacgcccggagggtgaaccggctaatgtcaaatctcagtgtcgaaattgcgaataggcagaggtaaaccggggtttgtaatttaagatttcagattcccgtccccgcacggcccatgcctaattctc

SEQ ID NO: 1078 - DNA, 105115 bp, Artificial Sequence; identical to SEQ ID NO: 1077
  Artificial Sequence
  misc_feature (1)..(96573): n is a, c, g, or t

SEQ ID NO: 1079 - DNA, 105115 bp, Artificial Sequence; identical to SEQ ID NO: 1077
  Synthetic Oligonucleotide
  misc_feature (1)..(96573): n is a, c, g, or t

SEQ ID NO: 1080 - DNA, 105108 bp, Artificial Sequence
  Synthetic Oligonucleotide
  misc_feature (1)..(96580): n is a, c, g, or t
nnnnnnnnnnnnnnnnnnnnnnnnnnnnnnnnnnnnnnnnnnnnnnnnnnnnnnnnnnnnnnnnnnnnnnnnnnnnnnnnnnnnnnnnnnnnnnnnnnnnnnnnnnnnnnnnnnnnnnnnnnnnnnnnnnnnnnnnnnnnnnnnnnnnnnnnnnnnnnnnnnnnnnnnnnnnnnnnnnnnnnnnnnnnnnnnnnnnnnnnnnnnnnnnnnnnnnnnnnnnnnnnnnnnnnnnnnnnnnnnnnnnnnnnnnnnnnnnnnnnnnnnnnnnnnnnnnnnnnnnnnnnnnnnnnnnnnnnnnnnnnnnnnnnnnnnnnnnnnnnnnnnnnnnnnnnnnnnnnnnnnnnnnnnnnnnnnnnnnnnnnnnnnnnnnnnnnnnnnnnnnnnnnnnnnnnnnnnnnnnnnnnnnnnnnnnnnnnnnnnnnnnnnnnnnnnnnnnnnnnnnnnnnnnnnnnnnnnnnnnnnnnnnnnnnnnnnnnnnnnnnnnnnnnnnnnnnnnnnnnnnnnnnnnnnnnnnnnnnnnnnnnnnnnnnnnnnnnnnnnnnnnnnnnnnnnnnnnnnnnnnnnnnnnnnnnnnnnnnnnnnnnnnnnnnnnnnnnnnnnnnnnnnnnnnnnnnnnnnnnnnnnnnnnnnnnnnnnnnnnnnnnnnnnnnnnnnnnnnnnnnnnnnnnnnnnnnnnnnnnnnnnnnnnnnnnnnnnnnnnnnnnnnnnnnnnnnnnnnnnnnnnnnnnnnnnnnnnnnnnnnnnnnnnnnnnnnnnnnnnnnnnnnnnnnnnnnnnnnnnnnnnnnnnnnnnnnnnnnnnnnnnnnnnnnnnnnnnnnnnnnnnnnnnnnnnnnnnnnnnnnnnnnnnnnnnnnnnnnnnnnnnnnnnnnnnnnnnnnnnnnnnnnnnnnnnnnnnnnnnnnnnnnnnnnnnnnnnnnnnnnnnnnnnnnnnnnnnnnnnnnnnnnnnnnnnnnnnnnnnnnnnnnnnnnnnnnnnnnnnnnnnnnnnnnnnnnnnnnnnnnnnnnnnnnnnnnnnnnnnnnnnnnnnnnnnnnnnnnnnnnnnnnnnnnnnnnnnnnnnnnnnnnnnnnnnnnnnnnnnnnnnnnnnnnnnnnnnnnnnnnnnnnnnnnnnnnnnnnnnnnnnnnnnnnnnnnnnnnnnnnnnnnnnnnnnnnnnnnnnnnnnnnnnnnnnnnnnnnnnnnnnnnnnnnnnnnnnnnnnnnnnnnnnnnnnnnnnnnnnnnnnnnnnnnnnnnnnnnnnnnnnnnnnnnnnnnnnnnnnnnnnnnnnnnnnnnnnnnnnnnnnnnnnnnnnnnnnnnnnnnnnnnnnnnnnnnnnnnnnnnnnnnnnnnnnnnnnnnnnnnnnnnnnnnnnnnnnnnnnnnnnnnnnnnnnnnnnnnnnnnnnnnnnnnnnnnnnnnnnnnnnnnnnnnnnnnnnnnnnnnnnnnnnnnnnnnnnnnnnnnnnnnnnnnnnnnnnnnnnnnnnnnnnnnnnnnnnnnnnnnnnnnnnnnnnnnnnnnnnnnnnnnnnnnnnnnnnnnnnnnnnnnnnnnnnnnnnnnnnnnnnnnnnnnnnnnnnnnnnnnnnnnnnnnnnnnnnnnnnnnnnnnnnnnnnnnnnnnnnnnnnnnnnnnnnnnnnnnnnnnnnnnnnnnnnnnnnnnnnnnnnnnnnnnnnnnnnnnnnnnnnnnnnnnnnnnnnnnnnnnnnnnnnnnnnnnnnnnnnnnnnnnnnnnnnnnnnnnnnnnnnnnnnnnnnnnnnnnnnnnnnnnnnnnnnnnnnnnnnnnnnnnnnnnnnnnnnnnnnnnnnnnnnnnnnnnnnnnnnnnnnnnnnnnnnnnnnnnnnnnnnnnnnnnnnnnnnnnnnnnnnnnnnnnnnnnnnnnnnnnnnnnnnnnnnnnnnnnnnnnnnnnnnnnnnnnnnnnnnnnnnnnnnnnnnnnnnnnnnnnnnnnnnnnnnnnnnnnnnnnnnnnnnnnnnnnnnnnnnnnnnnnnnnnnnnnnnnnnnnnnnnnnnnnnnnnnnnnnnnnnnnnnnnnnnnnnnnnnnnnnnnnnnnnnnnnnnnnnnnnnnnnnnnnnnnnnnnnnnnnnnnnnnnnnnnnnnnnnnnnnnnnnnnnnnnnnnnnnnnnnnnnnnnnnnnnnnnnnnnnnnnnnnnnnnnnnnnnnnnnnnnnnnnnnnnnnnnnnnnnnnnnnnnnnnnnnnnnnnnnnnnnnnnnnnnnnnnnnnnnnnnnnnnnnnnnnnnnnnnnnnnnnnnnnnnnnnnnnnnnnnnnnnnnnnnnnnnnnnnnnnnnnnnnnnnnnnnnnnnnnnnnnnnnnnnnnnnnnnnnnnnnnnnnnnnnnnnnnnnnnnnnnnnnnnnnnnnnnnnnnnnnnnnnnnnnnnnnnnnnnnnnnnnnnnnnnnnnnnnnnnnnnnnnnnnnnnnnnnnnnnnnnnnnnnnnnnnnnnnnnnnnnnnnnnnnnnnnnnnnnnnnnnnnnnnnnnnnnnnnnnnnnnnnnnnnnnnnnnnnnnnnnnnnnnnnnnnnnnnnnnnnnnnnnnnnnnnnnnnnnnnnnnnnnnnnnnnnnnnnnnnnnnnnnnnnnnnnnnnnnnnnnnnnnnnnnnnnnnnnnnnnnnnnnnnnnnnnnnnnnnnnnnnnnnnnnnnnnnnnnnnnnnnnnnnnnnnnnnnnnnnnnnnnnnnnnnnnnnnnnnnnnnnnnnnnnnnnnnnnnnnnnnnnnnnnnnnnnnnnnnnnnnnnnnnnnnnnnnnnnnnnnnnnnnnnnnnnnnnnnnnnnnnnnnnnnnnnnnnnnnnnnnnnnnnnnnnnnnnnnnnnnnnnnnnnnnnnnnnnnnnnnnnnnnnnnnnnnnnnnnnnnnnnnnnnnnnnnnnnnnnnnnnnnnnnnnnnnnnnnnnnnnnnnnnnnnnnnnnnnnnnnnnnnnnnnnnnnnnnnnnnnnnnnnnnnnnnnnnnnnnnnnnnnnnnnnnnnnnnnnnnnnnnnnnnnnnnnnnnnnnnnnnnnnnnnnnnnnnnnnnnnnnnnnnnnnnnnnnnnnnnnnnnnnnnnnnnnnnnnnnnnnnnnnnnnnnnnnnnnnnnnnnnnnnnnnnnnnnnnnnnnnnnnnnnnnnnnnnnnnnnnnnnnnnnnnnnnnnnnnnnnnnnnnnnnnnnnnnnnnnnnnnnnnnnnnnnnnnnnnnnnnnnnnnnnnnnnnnnnnnnnnnnnnnnnnnnnnnnnnnnnnnnnnnnnnnnnnnnnnnnnnnnnnnnnnnnnnnnnnnnnnnnnnnnnnnnnnnnnnnnnnnnnnnnnnnnnnnnnnnnnnnnnnnnnnnnnnnnnnnnnnnnnnnnnnnnnnnnnnnnnnnnnnnnnnnnnnnnnnnnnnnnnnnnnnnnnnnnnnnnnnnnnnnnnnnnnnnnnnnnnnnnnnnnnnnnnnnnnnnnnnnnnnnnnnnnnnnnnnnnnnnnnnnnnnnnnnnnnnnnnnnnnnnnnnnnnnnnnnnnnnnnnnnnnnnnnnnnnnnnnnnnnnnnnnnnnnnnnnnnnnnnnnnnnnnnnnnnnnnnnnnnnnnnnnnnnnnnnnnnnnnnnnnnnnnnnnnnnnnnnnnnnnnnnnnnnnnnnnnnnnnnnnnnnnnnnnnnnnnnnnnnnnnnnnnnnnnnnnnnnnnnnnnnnnnnnnnnnnnnnnnnnnnnnnnnnnnnnnnnnnnnnnnnnnnnnnnnnnnnnnnnnnnnnnnnnnnnnnnnnnnnnnnnnnnnnnnnnnnnnnnnnnnnnnnnnnnnnnnnnnnnnnnnnnnnnnnnnnnnnnnnnnnnnnnnnnnnnnnnnnnnnnnnnnnnnnnnnnnnnnnnnnnnnnnnnnnnnnnnnnnnnnnnnnnnnnnnnnnnnnnnnnnnnnnnnnnnnnnnnnnnnnnnnnnnnnnnnnnnnnnnnnnnnnnnnnnnnnnnnnnnnnnnnnnnnnnnnnnnnnnnnnnnnnnnnnnnnnnnnnnnnnnnnnnnnnnnnnnnnnnnnnnnnnnnnnnnnnnnnnnnnnnnnnnnnnnnnnnnnnnnnnnnnnnnnnnnnnnnnnnnnnnnnnnnnnnnnnnnnnnnnnnnnnnnnnnnnnnnnnnnnnnnnnnnnnnnnnnnnnnnnnnnnnnnnnnnnnnnnnnnnnnnnnnnnnnnnnnnnnnnnnnnnnnnnnnnnnnnnnnnnnnnnnnnnnnnnnnnnnnnnnnnnnnnnnnnnnnnnnnnnnnnnnnnnnnnnnnnnnnnnnnnnnnnnnnnnnnnnnnnnnnnnnnnnnnnnnnnnnnnnnnnnnnnnnnnnnnnnnnnnnnnnnnnnnnnnnnnnnnnnnnnnnnnnnnnnnnnnnnnnnnnnnnnnnnnnnnnnnnnnnnnnnnnnnnnnnnnnnnnnnnnnnnnnnnnnnnnnnnnnnnnnnnnnnnnnnnnnnnnnnnnnnnnnnnnnnnnnnnnnnnnnnnnnnnnnnnnnnnnnnnnnnnnnnnnnnnnnnnnnnnnnnnnnnnnnnnnnnnnnnnnnnnnnnnnnnnnnnnnnnnnnnnnnnnnnnnnnnnnnnnnnnnnnnnnnnnnnnnnnnnnnnnnnnnnnnnnnnnnnnnnnnnnnnnnnnnnnnnnnnnnnnnnnnnnnnnnnnnnnnnnnnnnnnnnnnnnnnnnnnnnnnnnnnnnnnnnnnnnnnnnnnnnnnnnnnnnnnnnnnnnnnnnnnnnnnnnnnnnnnnnnnnnnnnnnnnnnnnnnnnnnnnnnnnnnnnnnnnnnnnnnnnnnnnnnnnnnnnnnnnnnnnnnnnnnnnnnnnnnnnnnnnnnnnnnnnnnnnnnnnnnnnnnnnnnnnnnnnnnnnnnnnnnnnnnnnnnnnnnnnnnnnnnnnnnnnnnnnnnnnnnnnnnnnnnnnnnnnnnnnnnnnnnnnnnnnnnnnnnnnnnnnnnnnnnnnnnnnnnnnnnnnnnnnnnnnnnnnnnnnnnnnnnnnnnnnnnnnnnnnnnnnnnnnnnnnnnnnnnnnnnnnnnnnnnnnnnnnnnnnnnnnnnnnnnnnnnnnnnnnnnnnnnnnnnnnnnnnnnnnnnnnnnnnnnnnnnnnnnnnnnnnnnnnnnnnnnnnnnnnnnnnnnnnnnnnnnnnnnnnnnnnnnnnnnnnnnnnnnnnnnnnnnnnnnnnnnnnnnnnnnnnnnnnnnnnnnnnnnnnnnnnnnnnnnnnnnnnnnnnnnnnnnnnnnnnnnnnnnnnnnnnnnnnnnnnnnnnnnnnnnnnnnnnnnnnnnnnnnnnnnnnnnnnnnnnnnnnnnnnnnnnnnnnnnnnnnnnnnnnnnnnnnnnnnnnnnnnnnnnnnnnnnnnnnnnnnnnnnnnnnnnnnnnnnnnnnnnnnnnnnnnnnnnnnnnnnnnnnnnnnnnnnnnnnnnnnnnnnnnnnnnnnnnnnnnnnnnnnnnnnnnnnnnnnnnnnnnnnnnnnnnnnnnnnnnnnnnnnnnnnnnnnnnnnnnnnnnnnnnnnnnnnnnnnnnnnnnnnnnnnnnnnnnnnnnnnnnnnnnnnnnnnnnnnnnnnnnnnnnnnnnnnnnnnnnnnnnnnnnnnnnnnnnnnnnnnnnnnnnnnnnnnnnnnnnnnnnnnnnnnnnnnnnnnnnnnnnnnnnnnnnnnnnnnnnnnnnnnnnnnnnnnnnnnnnnnnnnnnnnnnnnnnnnnnnnnnnnnnnnnnnnnnnnnnnnnnnnnnnnnnnnnnnnnnnnnnnnnnnnnnnnnnnnnnnnnnnnnnnnnnnnnnnnnnnnnnnnnnnnnnnnnnnnnnnnnnnnnnnnnnnnnnnnnnnnnnnnnnnnnnnnnnnnnnnnnnnnnnnnnnnnnnnnnnnnnnnnnnnnnnnnnnnnnnnnnnnnnnnnnnnnnnnnnnnnnnnnnnnnnnnnnnnnnnnnnnnnnnnnnnnnnnnnnnnnnnnnnnnnnnnnnnnnnnnnnnnnnnnnnnnnnnnnnnnnnnnnnnnnnnnnnnnnnnnnnnnnnnnnnnnnnnnnnnnnnnnnnnnnnnnnnnnnnnnnnnnnnnnnnnnnnnnnnnnnnnnnnnnnnnnnnnnnnnnnnnnnnnnnnnnnnnnnnnnnnnnnnnnnnnnnnnnnnnnnnnnnnnnnnnnnnnnnnnnnnnnnnnnnnnnnnnnnnnnnnnnnnnnnnnnnnnnnnnnnnnnnnnnnnnnnnnnnnnnnnnnnnnnnnnnnnnnnnnnnnnnnnnnnnnnnnnnnnnnnnnnnnnnnnnnnnnnnnnnnnnnnnnnnnnnnnnnnnnnnnnnnnnnnnnnnnnnnnnnnnnnnnnnnnnnnnnnnnnnnnnnnnnnnnnnnnnnnnnnnnnnnnnnnnnnnnnnnnnnnnnnnnnnnnnnnnnnnnnnnnnnnnnnnnnnnnnnnnnnnnnnnnnnnnnnnnnnnnnnnnnnnnnnnnnnnnnnnnnnnnnnnnnnnnnnnnnnnnnnnnnnnnnnnnnnnnnnnnnnnnnnnnnnnnnnnnnnnnnnnnnnnnnnnnnnnnnnnnnnnnnnnnnnnnnnnnnnnnnnnnnnnnnnnnnnnnnnnnnnnnnnnnnnnnnnnnnnnnnnnnnnnnnnnnnnnnnnnnnnnnnnnnnnnnnnnnnnnnnnnnnnnnnnnnnnnnnnnnnnnnnnnnnnnnnnnnnnnnnnnnnnnnnnnnnnnnnnnnnnnnnnnnnnnnnnnnnnnnnnnnnnnnnnnnnnnnnnnnnnnnnnnnnnnnnnnnnnnnnnnnnnnnnnnnnnnnnnnnnnnnnnnnnnnnnnnnnnnnnnnnnnnnnnnnnnnnnnnnnnnnnnnnnnnnnnnnnnnnnnnnnnnnnnnnnnnnnnnnnnnnnnnnnnnnnnnnnnnnnnnnnnnnnnnnnnnnnnnnnnnnnnnnnnnnnnnnnnnnnnnnnnnnnnnnnnnnnnnnnnnnnnnnnnnnnnnnnnnnnnnnnnnnnnnnnnnnnnnnnnnnnnnnnnnnnnnnnnnnnnnnnnnnnnnnnnnnnnnnnnnnnnnnnnnnnnnnnnnnnnnnnnnnnnnnnnnnnnnnnnnnnnnnnnnnnnnnnnnnnnnnnnnnnnnnnnnnnnnnnnnnnnnnnnnnnnnnnnnnnnnnnnnnnnnnnnnnnnnnnnnnnnnnnnnnnnnnnnnnnnnnnnnnnnnnnnnnnnnnnnnnnnnnnnnnnnnnnnnnnnnnnnnnnnnnnnnnnnnnnnnnnnnnnnnnnnnnnnnnnnnnnnnnnnnnnnnnnnnnnnnnnnnnnnnnnnnnnnnnnnnnnnnnnnnnnnnnnnnnnnnnnnnnnnnnnnnnnnnnnnnnnnnnnnnnnnnnnnnnnnnnnnnnnnnnnnnnnnnnnnnnnnnnnnnnnnnnnnnnnnnnnnnnnnnnnnnnnnnnnnnnnnnnnnnnnnnnnnnnnnnnnnnnnnnnnnnnnnnnnnnnnnnnnnnnnnnnnnnnnnnnnnnnnnnnnnnnnnnnnnnnnnnnnnnnnnnnnnnnnnnnnnnnnnnnnnnnnnnnnnnnnnnnnnnnnnnnnnnnnnnnnnnnnnnnnnnnnnnnnnnnnnnnnnnnnnnnnnnnnnnnnnnnnnnnnnnnnnnnnnnnnnnnnnnnnnnnnnnnnnnnnnnnnnnnnnnnnnnnnnnnnnnnnnnnnnnnnnnnnnnnnnnnnnnnnnnnnnnnnnnnnnnnnnnnnnnnnnnnnnnnnnnnnnnnnnnnnnnnnnnnnnnnnnnnnnnnnnnnnnnnnnnnnnnnnnnnnnnnnnnnnnnnnnnnnnnnnnnnnnnnnnnnnnnnnnnnnnnnnnnnnnnnnnnnnnnnnnnnnnnnnnnnnnnnnnnnnnnnnnnnnnnnnnnnnnnnnnnnnnnnnnnnnnnnnnnnnnnnnnnnnnnnnnnnnnnnnnnnnnnnnnnnnnnnnnnnnnnnnnnnnnnnnnnnnnnnnnnnnnnnnnnnnnnnnnnnnnnnnnnnnnnnnnnnnnnnnnnnnnnnnnnnnnnnnnnnnnnnnnnnnnnnnnnnnnnnnnnnnnnnnnnnnnnnnnnnnnnnnnnnnnnnnnnnnnnnnnnnnnnnnnnnnnnnnnnnnnnnnnnnnnnnnnnnnnnnnnnnnnnnnnnnnnnnnnnnnnnnnnnnnnnnnnnnnnnnnnnnnnnnnnnnnnnnnnnnnnnnnnnnnnnnnnnnnnnnnnnnnnnnnnnnnnnnnnnnnnnnnnnnnnnnnnnnnnnnnnnnnnnnnnnnnnnnnnnnnnnnnnnnnnnnnnnnnnnnnnnnnnnnnnnnnnnnnnnnnnnnnnnnnnnnnnnnnnnnnnnnnnnnnnnnnnnnnnnnnnnnnnnnnnnnnnnnnnnnnnnnnnnnnnnnnnnnnnnnnnnnnnnnnnnnnnnnnnnnnnnnnnnnnnnnnnnnnnnnnnnnnnnnnnnnnnnnnnnnnnnnnnnnnnnnnnnnnnnnnnnnnnnnnnnnnnnnnnnnnnnnnnnnnnnnnnnnnnnnnnnnnnnnnnnnnnnnnnnnnnnnnnnnnnnnnnnnnnnnnnnnnnnnnnnnnnnnnnnnnnnnnnnnnnnnnnnnnnnnnnnnnnnnnnnnnnnnnnnnnnnnnnnnnnnnnnnnnnnnnnnnnnnnnnnnnnnnnnnnnnnnnnnnnnnnnnnnnnnnnnnnnnnnnnnnnnnnnnnnnnnnnnnnnnnnnnnnnnnnnnnnnnnnnnnnnnnnnnnnnnnnnnnnnnnnnnnnnnnnnnnnnnnnnnnnnnnnnnnnnnnnnnnnnnnnnnnnnnnnnnnnnnnnnnnnnnnnnnnnnnnnnnnnnnnnnnnnnnnnnnnnnnnnnnnnnnnnnnnnnnnnnnnnnnnnnnnnnnnnnnnnnnnnnnnnnnnnnnnnnnnnnnnnnnnnnnnnnnnnnnnnnnnnnnnnnnnnnnnnnnnnnnnnnnnnnnnnnnnnnnnnnnnnnnnnnnnnnnnnnnnnnnnnnnnnnnnnnnnnnnnnnnnnnnnnnnnnnnnnnnnnnnnnnnnnnnnnnnnnnnnnnnnnnnnnnnnnnnnnnnnnnnnnnnnnnnnnnnnnnnnnnnnnnnnnnnnnnnnnnnnnnnnnnnnnnnnnnnnnnnnnnnnnnnnnnnnnnnnnnnnnnnnnnnnnnnnnnnnnnnnnnnnnnnnnnnnnnnnnnnnnnnnnnnnnnnnnnnnnnnnnnnnnnnnnnnnnnnnnnnnnnnnnnnnnnnnnnnnnnnnnnnnnnnnnnnnnnnnnnnnnnnnnnnnnnnnnnnnnnnnnnnnnnnnnnnnnnnnnnnnnnnnnnnnnnnnnnnnnnnnnnnnnnnnnnnnnnnnnnnnnnnnnnnnnnnnnnnnnnnnnnnnnnnnnnnnnnnnnnnnnnnnnnnnnnnnnnnnnnnnnnnnnnnnnnnnnnnnnnnnnnnnnnnnnnnnnnnnnnnnnnnnnnnnnnnnnnnnnnnnnnnnnnnnnnnnnnnnnnnnnnnnnnnnnnnnnnnnnnnnnnnnnnnnnnnnnnnnnnnnnnnnnnnnnnnnnnnnnnnnnnnnnnnnnnnnnnnnnnnnnnnnnnnnnnnnnnnnnnnnnnnnnnnnnnnnnnnnnnnnnnnnnnnnnnnnnnnnnnnnnnnnnnnnnnnnnnnnnnnnnnnnnnnnnnnnnnnnnnnnnnnnnnnnnnnnnnnnnnnnnnnnnnnnnnnnnnnnnnnnnnnnnnnnnnnnnnnnnnnnnnnnnnnnnnnnnnnnnnnnnnnnnnnnnnnnnnnnnnnnnnnnnnnnnnnnnnnnnnnnnnnnnnnnnnnnnnnnnnnnnnnnnnnnnnnnnnnnnnnnnnnnnnnnnnnnnnnnnnnnnnnnnnnnnnnnnnnnnnnnnnnnnnnnnnnnnnnnnnnnnnnnnnnnnnnnnnnnnnnnnnnnnnnnnnnnnnnnnnnnnnnnnnnnnnnnnnnnnnnnnnnnnnnnnnnnnnnnnnnnnnnnnnnnnnnnnnnnnnnnnnnnnnnnnnnnnnnnnnnnnnnnnnnnnnnnnnnnnnnnnnnnnnnnnnnnnnnnnnnnnnnnnnnnnnnnnnnnnnnnnnnnnnnnnnnnnnnnnnnnnnnnnnnnnnnnnnnnnnnnnnnnnnnnnnnnnnnnnnnnnnnnnnnnnnnnnnnnnnnnnnnnnnnnnnnnnnnnnnnnnnnnnnnnnnnnnnnnnnnnnnnnnnnnnnnnnnnnnnnnnnnnnnnnnnnnnnnnnnnnnnnnnnnnnnnnnnnnnnnnnnnnnnnnnnnnnnnnnnnnnnnnnnnnnnnnnnnnnnnnnnnnnnnnnnnnnnnnnnnnnnnnnnnnnnnnnnnnnnnnnnnnnnnnnnnnnnnnnnnnnnnnnnnnnnnnnnnnnnnnnnnnnnnnnnnnnnnnnnnnnnnnnnnnnnnnnnnnnnnnnnnnnnnnnnnnnnnnnnnnnnnnnnnnnnnnnnnnnnnnnnnnnnnnnnnnnnnnnnnnnnnnnnnnnnnnnnnnnnnnnnnnnnnnnnnnnnnnnnnnnnnnnnnnnnnnnnnnnnnnnnnnnnnnnnnnnnnnnnnnnnnnnnnnnnnnnnnnnnnnnnnnnnnnnnnnnnnnnnnnnnnnnnnnnnnnnnnnnnnnnnnnnnnnnnnnnnnnnnnnnnnnnnnnnnnnnnnnnnnnnnnnnnnnnnnnnnnnnnnnnnnnnnnnnnnnnnnnnnnnnnnnnnnnnnnnnnnnnnnnnnnnnnnnnnnnnnnnnnnnnnnnnnnnnnnnnnnnnnnnnnnnnnnnnnnnnnnnnnnnnnnnnnnnnnnnnnnnnnnnnnnnnnnnnnnnnnnnnnnnnnnnnnnnnnnnnnnnnnnnnnnnnnnnnnnnnnnnnnnnnnnnnnnnnnnnnnnnnnnnnnnnnnnnnnnnnnnnnnnnnnnnnnnnnnnnnnnnnnnnnnnnnnnnnnnnnnnnnnnnnnnnnnnnnnnnnnnnnnnnnnnnnnnnnnnnnnnnnnnnnnnnnnnnnnnnnnnnnnnnnnnnnnnnnnnnnnnnnnnnnnnnnnnnnnnnnnnnnnnnnnnnnnnnnnnnnnnnnnnnnnnnnnnnnnnnnnnnnnnnnnnnnnnnnnnnnnnnnnnnnnnnnnnnnnnnnnnnnnnnnnnnnnnnnnnnnnnnnnnnnnnnnnnnnnnnnnnnnnnnnnnnnnnnnnnnnnnnnnnnnnnnnnnnnnnnnnnnnnnnnnnnnnnnnnnnnnnnnnnnnnnnnnnnnnnnnnnnnnnnnnnnnnnnnnnnnnnnnnnnnnnnnnnnnnnnnnnnnnnnnnnnnnnnnnnnnnnnnnnnnnnnnnnnnnnnnnnnnnnnnnnnnnnnnnnnnnnnnnnnnnnnnnnnnnnnnnnnnnnnnnnnnnnnnnnnnnnnnnnnnnnnnnnnnnnnnnnnnnnnnnnnnnnnnnnnnnnnnnnnnnnnnnnnnnnnnnnnnnnnnnnnnnnnnnnnnnnnnnnnnnnnnnnnnnnnnnnnnnnnnnnnnnnnnnnnnnnnnnnnnnnnnnnnnnnnnnnnnnnnnnnnnnnnnnnnnnnnnnnnnnnnnnnnnnnnnnnnnnnnnnnnnnnnnnnnnnnnnnnnnnnnnnnnnnnnnnnnnnnnnnnnnnnnnnnnnnnnnnnnnnnnnnnnnnnnnnnnnnnnnnnnnnnnnnnnnnnnnnnnnnnnnnnnnnnnnnnnnnnnnnnnnnnnnnnnnnnnnnnnnnnnnnnnnnnnnnnnnnnnnnnnnnnnnnnnnnnnnnnnnnnnnnnnnnnnnnnnnnnnnnnnnnnnnnnnnnnnnnnnnnnnnnnnnnnnnnnnnnnnnnnnnnnnnnnnnnnnnnnnnnnnnnnnnnnnnnnnnnnnnnnnnnnnnnnnnnnnnnnnnnnnnnnnnnnnnnnnnnnnnnnnnnnnnnnnnnnnnnnnnnnnnnnnnnnnnnnnnnnnnnnnnnnnnnnnnnnnnnnnnnnnnnnnnnnnnnnnnnnnnnnnnnnnnnnnnnnnnnnnnnnnnnnnnnnnnnnnnnnnnnnnnnnnnnnnnnnnnnnnnnnnnnnnnnnnnnnnnnnnnnnnnnnnnnnnnnnnnnnnnnnnnnnnnnnnnnnnnnnnnnnnnnnnnnnnnnnnnnnnnnnnnnnnnnnnnnnnnnnnnnnnnnnnnnnnnnnnnnnnnnnnnnnnnnnnnnnnnnnnnnnnnnnnnnnnnnnnnnnnnnnnnnnnnnnnnnnnnnnnnnnnnnnnnnnnnnnnnnnnnnnnnnnnnnnnnnnnnnnnnnnnnnnnnnnnnnnnnnnnnnnnnnnnnnnnnnnnnnnnnnnnnnnnnnnnnnnnnnnnnnnnnnnnnnnnnnnnnnnnnnnnnnnnnnnnnnnnnnnnnnnnnnnnnnnnnnnnnnnnnnnnnnnnnnnnnnnnnnnnnnnnnnnnnnnnnnnnnnnnnnnnnnnnnnnnnnnnnnnnnnnnnnnnnnnnnnnnnnnnnnnnnnnnnnnnnnnnnnnnnnnnnnnnnnnnnnnnnnnnnnnnnnnnnnnnnnnnnnnnnnnnnnnnnnnnnnnnnnnnnnnnnnnnnnnnnnnnnnnnnnnnnnnnnnnnnnnnnnnnnnnnnnnnnnnnnnnnnnnnnnnnnnnnnnnnnnnnnnnnnnnnnnnnnnnnnnnnnnnnnnnnnnnnnnnnnnnnnnnnnnnnnnnnnnnnnnnnnnnnnnnnnnnnnnnnnnnnnnnnnnnnnnnnnnnnnnnnnnnnnnnnnnnnnnnnnnnnnnnnnnnnnnnnnnnnnnnnnnnnnnnnnnnnnnnnnnnnnnnnnnnnnnnnnnnnnnnnnnnnnnnnnnnnnnnnnnnnnnnnnnnnnnnnnnnnnnnnnnnnnnnnnnnnnnnnnnnnnnnnnnnnnnnnnnnnnnnnnnnnnnnnnnnnnnnnnnnnnnnnnnnnnnnnnnnnnnnnnnnnnnnnnnnnnnnnnnnnnnnnnnnnnnnnnnnnnnnnnnnnnnnnnnnnnnnnnnnnnnnnnnnnnnnnnnnnnnnnnnnnnnnnnnnnnnnnnnnnnnnnnnnnnnnnnnnnnnnnnnnnnnnnnnnnnnnnnnnnnnnnnnnnnnnnnnnnnnnnnnnnnnnnnnnnnnnnnnnnnnnnnnnnnnnnnnnnnnnnnnnnnnnnnnnnnnnnnnnnnnnnnnnnnnnnnnnnnnnnnnnnnnnnnnnnnnnnnnnnnnnnnnnnnnnnnnnnnnnnnnnnnnnnnnnnnnnnnnnnnnnnnnnnnnnnnnnnnnnnnnnnnnnnnnnnnnnnnnnnnnnnnnnnnnnnnnnnnnnnnnnnnnnnnnnnnnnnnnnnnnnnnnnnnnnnnnnnnnnnnnnnnnnnnnnnnnnnnnnnnnnnnnnnnnnnnnnnnnnnnnnnnnnnnnnnnnnnnnnnnnnnnnnnnnnnnnnnnnnnnnnnnnnnnnnnnnnnnnnnnnnnnnnnnnnnnnnnnnnnnnnnnnnnnnnnnnnnnnnnnnnnnnnnnnnnnnnnnnnnnnnnnnnnnnnnnnnnnnnnnnnnnnnnnnnnnnnnnnnnnnnnnnnnnnnnnnnnnnnnnnnnnnnnnnnnnnnnnnnnnnnnnnnnnnnnnnnnnnnnnnnnnnnnnnnnnnnnnnnnnnnnnnnnnnnnnnnnnnnnnnnnnnnnnnnnnnnnnnnnnnnnnnnnnnnnnnnnnnnnnnnnnnnnnnnnnnnnnnnnnnnnnnnnnnnnnnnnnnnnnnnnnnnnnnnnnnnnnnnnnnnnnnnnnnnnnnnnnnnnnnnnnnnnnnnnnnnnnnnnnnnnnnnnnnnnnnnnnnnnnnnnnnnnnnnnnnnnnnnnnnnnnnnnnnnnnnnnnnnnnnnnnnnnnnnnnnnnnnnnnnnnnnnnnnnnnnnnnnnnnnnnnnnnnnnnnnnnnnnnnnnnnnnnnnnnnnnnnnnnnnnnnnnnnnnnnnnnnnnnnnnnnnnnnnnnnnnnnnnnnnnnnnnnnnnnnnnnnnnnnnnnnnnnnnnnnnnnnnnnnnnnnnnnnnnnnnnnnnnnnnnnnnnnnnnnnnnnnnnnnnnnnnnnnnnnnnnnnnnnnnnnnnnnnnnnnnnnnnnnnnnnnnnnnnnnnnnnnnnnnnnnnnnnnnnnnnnnnnnnnnnnnnnnnnnnnnnnnnnnnnnnnnnnnnnnnnnnnnnnnnnnnnnnnnnnnnnnnnnnnnnnnnnnnnnnnnnnnnnnnnnnnnnnnnnnnnnnnnnnnnnnnnnnnnnnnnnnnnnnnnnnnnnnnnnnnnnnnnnnnnnnnnnnnnnnnnnnnnnnnnnnnnnnnnnnnnnnnnnnnnnnnnnnnnnnnnnnnnnnnnnnnnnnnnnnnnnnnnnnnnnnnnnnnnnnnnnnnnnnnnnnnnnnnnnnnnnnnnnnnnnnnnnnnnnnnnnnnnnnnnnnnnnnnnnnnnnnnnnnnnnnnnnnnnnnnnnnnnnnnnnnnnnnnnnnnnnnnnnnnnnnnnnnnnnnnnnnnnnnnnnnnnnnnnnnnnnnnnnnnnnnnnnnnnnnnnnnnnnnnnnnnnnnnnnnnnnnnnnnnnnnnnnnnnnnnnnnnnnnnnnnnnnnnnnnnnnnnnnnnnnnnnnnnnnnnnnnnnnnnnnnnnnnnnnnnnnnnnnnnnnnnnnnnnnnnnnnnnnnnnnnnnnnnnnnnnnnnnnnnnnnnnnnnnnnnnnnnnnnnnnnnnnnnnnnnnnnnnnnnnnnnnnnnnnnnnnnnnnnnnnnnnnnnnnnnnnnnnnnnnnnnnnnnnnnnnnnnnnnnnnnnnnnnnnnnnnnnnnnnnnnnnnnnnnnnnnnnnnnnnnnnnnnnnnnnnnnnnnnnnnnnnnnnnnnnnnnnnnnnnnnnnnnnnnnnnnnnnnnnnnnnnnnnnnnnnnnnnnnnnnnnnnnnnnnnnnnnnnnnnnnnnnnnnnnnnnnnnnnnnnnnnnnnnnnnnnnnnnnnnnnnnnnnnnnnnnnnnnnnnnnnnnnnnnnnnnnnnnnnnnnnnnnnnnnnnnnnnnnnnnnnnnnnnnnnnnnnnnnnnnnnnnnnnnnnnnnnnnnnnnnnnnnnnnnnnnnnnnnnnnnnnnnnnnnnnnnnnnnnnnnnnnnnnnnnnnnnnnnnnnnnnnnnnnnnnnnnnnnnnnnnnnnnnnnnnnnnnnnnnnnnnnnnnnnnnnnnnnnnnnnnnnnnnnnnnnnnnnnnnnnnnnnnnnnnnnnnnnnnnnnnnnnnnnnnnnnnnnnnnnnnnnnnnnnnnnnnnnnnnnnnnnnnnnnnnnnnnnnnnnnnnnnnnnnnnnnnnnnnnnnnnnnnnnnnnnnnnnnnnnnnnnnnnnnnnnnnnnnnnnnnnnnnnnnnnnnnnnnnnnnnnnnnnnnnnnnnnnnnnnnnnnnnnnnnnnnnnnnnnnnnnnnnnnnnnnnnnnnnnnnnnnnnnnnnnnnnnnnnnnnnnnnnnnnnnnnnnnnnnnnnnnnnnnnnnnnnnnnnnnnnnnnnnnnnnnnnnnnnnnnnnnnnnnnnnnnnnnnnnnnnnnnnnnnnnnnnnnnnnnnnnnnnnnnnnnnnnnnnnnnnnnnnnnnnnnnnnnnnnnnnnnnnnnnnnnnnnnnnnnnnnnnnnnnnnnnnnnnnnnnnnnnnnnnnnnnnnnnnnnnnnnnnnnnnnnnnnnnnnnnnnnnnnnnnnnnnnnnnnnnnnnnnnnnnnnnnnnnnnnnnnnnnnnnnnnnnnnnnnnnnnnnnnnnnnnnnnnnnnnnnnnnnnnnnnnnnnnnnnnnnnnnnnnnnnnnnnnnnnnnnnnnnnnnnnnnnnnnnnnnnnnnnnnnnnnnnnnnnnnnnnnnnnnnnnnnnnnnnnnnnnnnnnnnnnnnnnnnnnnnnnnnnnnnnnnnnnnnnnnnnnnnnnnnnnnnnnnnnnnnnnnnnnnnnnnnnnnnnnnnnnnnnnnnnnnnnnnnnnnnnnnnnnnnnnnnnnnnnnnnnnnnnnnnnnnnnnnnnnnnnnnnnnnnnnnnnnnnnnnnnnnnnnnnnnnnnnnnnnnnnnnnnnnnnnnnnnnnnnnnnnnnnnnnnnnnnnnnnnnnnnnnnnnnnnnnnnnnnnnnnnnnnnnnnnnnnnnnnnnnnnnnnnnnnnnnnnnnnnnnnnnnnnnnnnnnnnnnnnnnnnnnnnnnnnnnnnnnnnnnnnnnnnnnnnnnnnnnnnnnnnnnnnnnnnnnnnnnnnnnnnnnnnnnnnnnnnnnnnnnnnnnnnnnnnnnnnnnnnnnnnnnnnnnnnnnnnnnnnnnnnnnnnnnnnnnnnnnnnnnnnnnnnnnnnnnnnnnnnnnnnnnnnnnnnnnnnnnnnnnnnnnnnnnnnnnnnnnnnnnnnnnnnnnnnnnnnnnnnnnnnnnnnnnnnnnnnnnnnnnnnnnnnnnnnnnnnnnnnnnnnnnnnnnnnnnnnnnnnnnnnnnnnnnnnnnnnnnnnnnnnnnnnnnnnnnnnnnnnnnnnnnnnnnnnnnnnnnnnnnnnnnnnnnnnnnnnnnnnnnnnnnnnnnnnnnnnnnnnnnnnnnnnnnnnnnnnnnnnnnnnnnnnnnnnnnnnnnnnnnnnnnnnnnnnnnnnnnnnnnnnnnnnnnnnnnnnnnnnnnnnnnnnnnnnnnnnnnnnnnnnnnnnnnnnnnnnnnnnnnnnnnnnnnnnnnnnnnnnnnnnnnnnnnnnnnnnnnnnnnnnnnnnnnnnnnnnnnnnnnnnnnnnnnnnnnnnnnnnnnnnnnnnnnnnnnnnnnnnnnnnnnnnnnnnnnnnnnnnnnnnnnnnnnnnnnnnnnnnnnnnnnnnnnnnnnnnnnnnnnnnnnnnnnnnnnnnnnnnnnnnnnnnnnnnnnnnnnnnnnnnnnnnnnnnnnnnnnnnnnnnnnnnnnnnnnnnnnnnnnnnnnnnnnnnnnnnnnnnnnnnnnnnnnnnnnnnnnnnnnnnnnnnnnnnnnnnnnnnnnnnnnnnnnnnnnnnnnnnnnnnnnnnnnnnnnnnnnnnnnnnnnnnnnnnnnnnnnnnnnnnnnnnnnnnnnnnnnnnnnnnnnnnnnnnnnnnnnnnnnnnnnnnnnnnnnnnnnnnnnnnnnnnnnnnnnnnnnnnnnnnnnnnnnnnnnnnnnnnnnnnnnnnnnnnnnnnnnnnnnnnnnnnnnnnnnnnnnnnnnnnnnnnnnnnnnnnnnnnnnnnnnnnnnnnnnnnnnnnnnnnnnnnnnnnnnnnnnnnnnnnnnnnnnnnnnnnnnnnnnnnnnnnnnnnnnnnnnnnnnnnnnnnnnnnnnnnnnnnnnnnnnnnnnnnnnnnnnnnnnnnnnnnnnnnnnnnnnnnnnnnnnnnnnnnnnnnnnnnnnnnnnnnnnnnnnnnnnnnnnnnnnnnnnnnnnnnnnnnnnnnnnnnnnnnnnnnnnnnnnnnnnnnnnnnnnnnnnnnnnnnnnnnnnnnnnnnnnnnnnnnnnnnnnnnnnnnnnnnnnnnnnnnnnnnnnnnnnnnnnnnnnnnnnnnnnnnnnnnnnnnnnnnnnnnnnnnnnnnnnnnnnnnnnnnnnnnnnnnnnnnnnnnnnnnnnnnnnnnnnnnnnnnnnnnnnnnnnnnnnnnnnnnnnnnnnnnnnnnnnnnnnnnnnnnnnnnnnnnnnnnnnnnnnnnnnnnnnnnnnnnnnnnnnnnnnnnnnnnnnnnnnnnnnnnnnnnnnnnnnnnnnnnnnnnnnnnnnnnnnnnnnnnnnnnnnnnnnnnnnnnnnnnnnnnnnnnnnnnnnnnnnnnnnnnnnnnnnnnnnnnnnnnnnnnnnnnnnnnnnnnnnnnnnnnnnnnnnnnnnnnnnnnnnnnnnnnnnnnnnnnnnnnnnnnnnnnnnnnnnnnnnnnnnnnnnnnnnnnnnnnnnnnnnnnnnnnnnnnnnnnnnnnnnnnnnnnnnnnnnnnnnnnnnnnnnnnnnnnnnnnnnnnnnnnnnnnnnnnnnnnnnnnnnnnnnnnnnnnnnnnnnnnnnnnnnnnnnnnnnnnnnnnnnnnnnnnnnnnnnnnnnnnnnnnnnnnnnnnnnnnnnnnnnnnnnnnnnnnnnnnnnnnnnnnnnnnnnnnnnnnnnnnnnnnnnnnnnnnnnnnnnnnnnnnnnnnnnnnnnnnnnnnnnnnnnnnnnnnnnnnnnnnnnnnnnnnnnnnnnnnnnnnnnnnnnnnnnnnnnnnnnnnnnnnnnnnnnnnnnnnnnnnnnnnnnnnnnnnnnnnnnnnnnnnnnnnnnnnnnnnnnnnnnnnnnnnnnnnnnnnnnnnnnnnnnnnnnnnnnnnnnnnnnnnnnnnnnnnnnnnnnnnnnnnnnnnnnnnnnnnnnnnnnnnnnnnnnnnnnnnnnnnnnnnnnnnnnnnnnnnnnnnnnnnnnnnnnnnnnnnnnnnnnnnnnnnnnnnnnnnnnnnnnnnnnnnnnnnnnnnnnnnnnnnnnnnnnnnnnnnnnnnnnnnnnnnnnnnnnnnnnnnnnnnnnnnnnnnnnnnnnnnnnnnnnnnnnnnnnnnnnnnnnnnnnnnnnnnnnnnnnnnnnnnnnnnnnnnnnnnnnnnnnnnnnnnnnnnnnnnnnnnnnnnnnnnnnnnnnnnnnnnnnnnnnnnnnnnnnnnnnnnnnnnnnnnnnnnnnnnnnnnnnnnnnnnnnnnnnnnnnnnnnnnnnnnnnnnnnnnnnnnnnnnnnnnnnnnnnnnnnnnnnnnnnnnnnnnnnnnnnnnnnnnnnnnnnnnnnnnnnnnnnnnnnnnnnnnnnnnnnnnnnnnnnnnnnnnnnnnnnnnnnnnnnnnnnnnnnnnnnnnnnnnnnnnnnnnnnnnnnnnnnnnnnnnnnnnnnnnnnnnnnnnnnnnnnnnnnnnnnnnnnnnnnnnnnnnnnnnnnnnnnnnnnnnnnnnnnnnnnnnnnnnnnnnnnnnnnnnnnnnnnnnnnnnnnnnnnnnnnnnnnnnnnnnnnnnnnnnnnnnnnnnnnnnnnnnnnnnnnnnnnnnnnnnnnnnnnnnnnnnnnnnnnnnnnnnnnnnnnnnnnnnnnnnnnnnnnnnnnnnnnnnnnnnnnnnnnnnnnnnnnnnnnnnnnnnnnnnnnnnnnnnnnnnnnnnnnnnnnnnnnnnnnnnnnnnnnnnnnnnnnnnnnnnnnnnnnnnnnnnnnnnnnnnnnnnnnnnnnnnnnnnnnnnnnnnnnnnnnnnnnnnnnnnnnnnnnnnnnnnnnnnnnnnnnnnnnnnnnnnnnnnnnnnnnnnnnnnnnnnnnnnnnnnnnnnnnnnnnnnnnnnnnnnnnnnnnnnnnnnnnnnnnnnnnnnnnnnnnnnnnnnnnnnnnnnnnnnnnnnnnnnnnnnnnnnnnnnnnnnnnnnnnnnnnnnnnnnnnnnnnnnnnnnnnnnnnnnnnnnnnnnnnnnnnnnnnnnnnnnnnnnnnnnnnnnnnnnnnnnnnnnnnnnnnnnnnnnnnnnnnnnnnnnnnnnnnnnnnnnnnnnnnnnnnnnnnnnnnnnnnnnnnnnnnnnnnnnnnnnnnnnnnnnnnnnnnnnnnnnnnnnnnnnnnnnnnnnnnnnnnnnnnnnnnnnnnnnnnnnnnnnnnnnnnnnnnnnnnnnnnnnnnnnnnnnnnnnnnnnnnnnnnnnnnnnnnnnnnnnnnnnnnnnnnnnnnnnnnnnnnnnnnnnnnnnnnnnnnnnnnnnnnnnnnnnnnnnnnnnnnnnnnnnnnnnnnnnnnnnnnnnnnnnnnnnnnnnnnnnnnnnnnnnnnnnnnnnnnnnnnnnnnnnnnnnnnnnnnnnnnnnnnnnnnnnnnnnnnnnnnnnnnnnnnnnnnnnnnnnnnnnnnnnnnnnnnnnnnnnnnnnnnnnnnnnnnnnnnnnnnnnnnnnnnnnnnnnnnnnnnnnnnnnnnnnnnnnnnnnnnnnnnnnnnnnnnnnnnnnnnnnnnnnnnnnnnnnnnnnnnnnnnnnnnnnnnnnnnnnnnnnnnnnnnnnnnnnnnnnnnnnnnnnnnnnnnnnnnnnnnnnnnnnnnnnnnnnnnnnnnnnnnnnnnnnnnnnnnnnnnnnnnnnnnnnnnnnnnnnnnnnnnnnnnnnnnnnnnnnnnnnnnnnnnnnnnnnnnnnnnnnnnnnnnnnnnnnnnnnnnnnnnnnnnnnnnnnnnnnnnnnnnnnnnnnnnnnnnnnnnnnnnnnnnnnnnnnnnnnnnnnnnnnnnnnnnnnnnnnnnnnnnnnnnnnnnnnnnnnnnnnnnnnnnnnnnnnnnnnnnnnnnnnnnnnnnnnnnnnnnnnnnnnnnnnnnnnnnnnnnnnnnnnnnnnnnnnnnnnnnnnnnnnnnnnnnnnnnnnnnnnnnnnnnnnnnnnnnnnnnnnnnnnnnnnnnnnnnnnnnnnnnnnnnnnnnnnnnnnnnnnnnnnnnnnnnnnnnnnnnnnnnnnnnnnnnnnnnnnnnnnnnnnnnnnnnnnnnnnnnnnnnnnnnnnnnnnnnnnnnnnnnnnnnnnnnnnnnnnnnnnnnnnnnnnnnnnnnnnnnnnnnnnnnnnnnnnnnnnnnnnnnnnnnnnnnnnnnnnnnnnnnnnnnnnnnnnnnnnnnnnnnnnnnnnnnnnnnnnnnnnnnnnnnnnnnnnnnnnnnnnnnnnnnnnnnnnnnnnnnnnnnnnnnnnnnnnnnnnnnnnnnnnnnnnnnnnnnnnnnnnnnnnnnnnnnnnnnnnnnnnnnnnnnnnnnnnnnnnnnnnnnnnnnnnnnnnnnnnnnnnnnnnnnnnnnnnnnnnnnnnnnnnnnnnnnnnnnnnnnnnnnnnnnnnnnnnnnnnnnnnnnnnnnnnnnnnnnnnnnnnnnnnnnnnnnnnnnnnnnnnnnnnnnnnnnnnnnnnnnnnnnnnnnnnnnnnnnnnnnnnnnnnnnnnnnnnnnnnnnnnnnnnnnnnnnnnnnnnnnnnnnnnnnnnnnnnnnnnnnnnnnnnnnnnnnnnnnnnnnnnnnnnnnnnnnnnnnnnnnnnnnnnnnnnnnnnnnnnnnnnnnnnnnnnnnnnnnnnnnnnnnnnnnnnnnnnnnnnnnnnnnnnnnnnnnnnnnnnnnnnnnnnnnnnnnnnnnnnnnnnnnnnnnnnnnnnnnnnnnnnnnnnnnnnnnnnnnnnnnnnnnnnnnnnnnnnnnnnnnnnnnnnnnnnnnnnnnnnnnnnnnnnnnnnnnnnnnnnnnnnnnnnnnnnnnnnnnnnnnnnnnnnnnnnnnnnnnnnnnnnnnnnnnnnnnnnnnnnnnnnnnnnnnnnnnnnnnnnnnnnnnnnnnnnnnnnnnnnnnnnnnnnnnnnnnnnnnnnnnnnnnnnnnnnnnnnnnnnnnnnnnnnnnnnnnnnnnnnnnnnnnnnnnnnnnnnnnnnnnnnnnnnnnnnnnnnnnnnnnnnnnnnnnnnnnnnnnnnnnnnnnnnnnnnnnnnnnnnnnnnnnnnnnnnnnnnnnnnnnnnnnnnnnnnnnnnnnnnnnnnnnnnnnnnnnnnnnnnnnnnnnnnnnnnnnnnnnnnnnnnnnnnnnnnnnnnnnnnnnnnnnnnnnnnnnnnnnnnnnnnnnnnnnnnnnnnnnnnnnnnnnnnnnnnnnnnnnnnnnnnnnnnnnnnnnnnnnnnnnnnnnnnnnnnnnnnnnnnnnnnnnnnnnnnnnnnnnnnnnnnnnnnnnnnnnnnnnnnnnnnnnnnnnnnnnnnnnnnnnnnnnnnnnnnnnnnnnnnnnnnnnnnnnnnnnnnnnnnnnnnnnnnnnnnnnnnnnnnnnnnnnnnnnnnnnnnnnnnnnnnnnnnnnnnnnnnnnnnnnnnnnnnnnnnnnnnnnnnnnnnnnnnnnnnnnnnnnnnnnnnnnnnnnnnnnnnnnnnnnnnnnnnnnnnnnnnnnnnnnnnnnnnnnnnnnnnnnnnnnnnnnnnnnnnnnnnnnnnnnnnnnnnnnnnnnnnnnnnnnnnnnnnnnnnnnnnnnnnnnnnnnnnnnnnnnnnnnnnnnnnnnnnnnnnnnnnnnnnnnnnnnnnnnnnnnnnnnnnnnnnnnnnnnnnnnnnnnnnnnnnnnnnnnnnnnnnnnnnnnnnnnnnnnnnnnnnnnnnnnnnnnnnnnnnnnnnnnnnnnnnnnnnnnnnnnnnnnnnnnnnnnnnnnnnnnnnnnnnnnnnnnnnnnnnnnnnnnnnnnnnnnnnnnnnnnnnnnnnnnnnnnnnnnnnnnnnnnnnnnnnnnnnnnnnnnnnnnnnnnnnnnnnnnnnnnnnnnnnnnnnnnnnnnnnnnnnnnnnnnnnnnnnnnnnnnnnnnnnnnnnnnnnnnnnnnnnnnnnnnnnnnnnnnnnnnnnnnnnnnnnnnnnnnnnnnnnnnnnnnnnnnnnnnnnnnnnnnnnnnnnnnnnnnnnnnnnnnnnnnnnnnnnnnnnnnnnnnnnnnnnnnnnnnnnnnnnnnnnnnnnnnnnnnnnnnnnnnnnnnnnnnnnnnnnnnnnnnnnnnnnnnnnnnnnnnnnnnnnnnnnnnnnnnnnnnnnnnnnnnnnnnnnnnnnnnnnnnnnnnnnnnnnnnnnnnnnnnnnnnnnnnnnnnnnnnnnnnnnnnnnnnnnnnnnnnnnnnnnnnnnnnnnnnnnnnnnnnnnnnnnnnnnnnnnnnnnnnnnnnnnnnnnnnnnnnnnnnnnnnnnnnnnnnnnnnnnnnnnnnnnnnnnnnnnnnnnnnnnnnnnnnnnnnnnnnnnnnnnnnnnnnnnnnnnnnnnnnnnnnnnnnnnnnnnnnnnnnnnnnnnnnnnnnnnnnnnnnnnnnnnnnnnnnnnnnnnnnnnnnnnnnnnnnnnnnnnnnnnnnnnnnnnnnnnnnnnnnnnnnnnnnnnnnnnnnnnnnnnnnnnnnnnnnnnnnnnnnnnnnnnnnnnnnnnnnnnnnnnnnnnnnnnnnnnnnnnnnnnnnnnnnnnnnnnnnnnnnnnnnnnnnnnnnnnnnnnnnnnnnnnnnnnnnnnnnnnnnnnnnnnnnnnnnnnnnnnnnnnnnnnnnnnnnnnnnnnnnnnnnnnnnnnnnnnnnnnnnnnnnnnnnnnnnnnnnnnnnnnnnnnnnnnnnnnnnnnnnnnnnnnnnnnnnnnnnnnnnnnnnnnnnnnnnnnnnnnnnnnnnnnnnnnnnnnnnnnnnnnnnnnnnnnnnnnnnnnnnnnnnnnnnnnnnnnnnnnnnnnnnnnnnnnnnnnnnnnnnnnnnnnnnnnnnnnnnnnnnnnnnnnnnnnnnnnnnnnnnnnnnnnnnnnnnnnnnnnnnnnnnnnnnnnnnnnnnnnnnnnnnnnnnnnnnnnnnnnnnnnnnnnnnnnnnnnnnnnnnnnnnnnnnnnnnnnnnnnnnnnnnnnnnnnnnnnnnnnnnnnnnnnnnnnnnnnnnnnnnnnnnnnnnnnnnnnnnnnnnnnnnnnnnnnnnnnnnnnnnnnnnnnnnnnnnnnnnnnnnnnnnnnnnnnnnnnnnnnnnnnnnnnnnnnnnnnnnnnnnnnnnnnnnnnnnnnnnnnnnnnnnnnnnnnnnnnnnnnnnnnnnnnnnnnnnnnnnnnnnnnnnnnnnnnnnnnnnnnnnnnnnnnnnnnnnnnnnnnnnnnnnnnnnnnnnnnnnnnnnnnnnnnnnnnnnnnnnnnnnnnnnnnnnnnnnnnnnnnnnnnnnnnnnnnnnnnnnnnnnnnnnnnnnnnnnnnnnnnnnnnnnnnnnnnnnnnnnnnnnnnnnnnnnnnnnnnnnnnnnnnnnnnnnnnnnnnnnnnnnnnnnnnnnnnnnnnnnnnnnnnnnnnnnnnnnnnnnnnnnnnnnnnnnnnnnnnnnnnnnnnnnnnnnnnnnnnnnnnnnnnnnnnnnnnnnnnnnnnnnnnnnnnnnnnnnnnnnnnnnnnnnnnnnnnnnnnnnnnnnnnnnnnnnnnnnnnnnnnnnnnnnnnnnnnnnnnnnnnnnnnnnnnnnnnnnnnnnnnnnnnnnnnnnnnnnnnnnnnnnnnnnnnnnnnnnnnnnnnnnnnnnnnnnnnnnnnnnnnnnnnnnnnnnnnnnnnnnnnnnnnnnnnnnnnnnnnnnnnnnnnnnnnnnnnnnnnnnnnnnnnnnnnnnnnnnnnnnnnnnnnnnnnnnnnnnnnnnnnnnnnnnnnnnnnnnnnnnnnnnnnnnnnnnnnnnnnnnnnnnnnnnnnnnnnnnnnnnnnnnnnnnnnnnnnnnnnnnnnnnnnnnnnnnnnnnnnnnnnnnnnnnnnnnnnnnnnnnnnnnnnnnnnnnnnnnnnnnnnnnnnnnnnnnnnnnnnnnnnnnnnnnnnnnnnnnnnnnnnnnnnnnnnnnnnnnnnnnnnnnnnnnnnnnnnnnnnnnnnnnnnnnnnnnnnnnnnnnnnnnnnnnnnnnnnnnnnnnnnnnnnnnnnnnnnnnnnnnnnnnnnnnnnnnnnnnnnnnnnnnnnnnnnnnnnnnnnnnnnnnnnnnnnnnnnnnnnnnnnnnnnnnnnnnnnnnnnnnnnnnnnnnnnnnnnnnnnnnnnnnnnnnnnnnnnnnnnnnnnnnnnnnnnnnnnnnnnnnnnnnnnnnnnnnnnnnnnnnnnnnnnnnnnnnnnnnnnnnnnnnnnnnnnnnnnnnnnnnnnnnnnnnnnnnnnnnnnnnnnnnnnnnnnnnnnnnnnnnnnnnnnnnnnnnnnnnnnnnnnnnnnnnnnnnnnnnnnnnnnnnnnnnnnnnnnnnnnnnnnnnnnnnnnnnnnnnnnnnnnnnnnnnnnnnnnnnnnnnnnnnnnnnnnnnnnnnnnnnnnnnnnnnnnnnnnnnnnnnnnnnnnnnnnnnnnnnnnnnnnnnnnnnnnnnnnnnnnnnnnnnnnnnnnnnnnnnnnnnnnnnnnnnnnnnnnnnnnnnnnnnnnnnnnnnnnnnnnnnnnnnnnnnnnnnnnnnnnnnnnnnnnnnnnnnnnnnnnnnnnnnnnnnnnnnnnnnnnnnnnnnnnnnnnnnnnnnnnnnnnnnnnnnnnnnnnnnnnnnnnnnnnnnnnnnnnnnnnnnnnnnnnnnnnnnnnnnnnnnnnnnnnnnnnnnnnnnnnnnnnnnnnnnnnnnnnnnnnnnnnnnnnnnnnnnnnnnnnnnnnnnnnnnnnnnnnnnnnnnnnnnnnnnnnnnnnnnnnnnnnnnnnnnnnnnnnnnnnnnnnnnnnnnnnnnnnnnnnnnnnnnnnnnnnnnnnnnnnnnnnnnnnnnnnnnnnnnnnnnnnnnnnnnnnnnnnnnnnnnnnnnnnnnnnnnnnnnnnnnnnnnnnnnnnnnnnnnnnnnnnnnnnnnnnnnnnnnnnnnnnnnnnnnnnnnnnnnnnnnnnnnnnnnnnnnnnnnnnnnnnnnnnnnnnnnnnnnnnnnnnnnnnnnnnnnnnnnnnnnnnnnnnnnnnnnnnnnnnnnnnnnnnnnnnnnnnnnnnnnnnnnnnnnnnnnnnnnnnnnnnnnnnnnnnnnnnnnnnnnnnnnnnnnnnnnnnnnnnnnnnnnnnnnnnnnnnnnnnnnnnnnnnnnnnnnnnnnnnnnnnnnnnnnnnnnnnnnnnnnnnnnnnnnnnnnnnnnnnnnnnnnnnnnnnnnnnnnnnnnnnnnnnnnnnnnnnnnnnnnnnnnnnnnnnnnnnnnnnnnnnnnnnnnnnnnnnnnnnnnnnnnnnnnnnnnnnnnnnnnnnnnnnnnnnnnnnnnnnnnnnnnnnnnnnnnnnnnnnnnnnnnnnnnnnnnnnnnnnnnnnnnnnnnnnnnnnnnnnnnnnnnnnnnnnnnnnnnnnnnnnnnnnnnnnnnnnnnnnnnnnnnnnnnnnnnnnnnnnnnnnnnnnnnnnnnnnnnnnnnnnnnnnnnnnnnnnnnnnnnnnnnnnnnnnnnnnnnnnnnnnnnnnnnnnnnnnnnnnnnnnnnnnnnnnnnnnnnnnnnnnnnnnnnnnnnnnnnnnnnnnnnnnnnnnnnnnnnnnnnnnnnnnnnnnnnnnnnnnnnnnnnnnnnnnnnnnnnnnnnnnnnnnnnnnnnnnnnnnnnnnnnnnnnnnnnnnnnnnnnnnnnnnnnnnnnnnnnnnnnnnnnnnnnnnnnnnnnnnnnnnnnnnnnnnnnnnnnnnnnnnnnnnnnnnnnnnnnnnnnnnnnnnnnnnnnnnnnnnnnnnnnnnnnnnnnnnnnnnnnnnnnnnnnnnnnnnnnnnnnnnnnnnnnnnnnnnnnnnnnnnnnnnnnnnnnnnnnnnnnnnnnnnnnnnnnnnnnnnnnnnnnnnnnnnnnnnnnnnnnnnnnnnnnnnnnnnnnnnnnnnnnnnnnnnnnnnnnnnnnnnnnnnnnnnnnnnnnnnnnnnnnnnnnnnnnnnnnnnnnnnnnnnnnnnnnnnnnnnnnnnnnnnnnnnnnnnnnnnnnnnnnnnnnnnnnnnnnnnnnnnnnnnnnnnnnnnnnnnnnnnnnnnnnnnnnnnnnnnnnnnnnnnnnnnnnnnnnnnnnnnnnnnnnnnnnnnnnnnnnnnnnnnnnnnnnnnnnnnnnnnnnnnnnnnnnnnnnnnnnnnnnnnnnnnnnnnnnnnnnnnnnnnnnnnnnnnnnnnnnnnnnnnnnnnnnnnnnnnnnnnnnnnnnnnnnnnnnnnnnnnnnnnnnnnnnnnnnnnnnnnnnnnnnnnnnnnnnnnnnnnnnnnnnnnnnnnnnnnnnnnnnnnnnnnnnnnnnnnnnnnnnnnnnnnnnnnnnnnnnnnnnnnnnnnnnnnnnnnnnnnnnnnnnnnnnnnnnnnnnnnnnnnnnnnnnnnnnnnnnnnnnnnnnnnnnnnnnnnnnnnnnnnnnnnnnnnnnnnnnnnnnnnnnnnnnnnnnnnnnnnnnnnnnnnnnnnnnnnnnnnnnnnnnnnnnnnnnnnnnnnnnnnnnnnnnnnnnnnnnnnnnnnnnnnnnnnnnnnnnnnnnnnnnnnnnnnnnnnnnnnnnnnnnnnnnnnnnnnnnnnnnnnnnnnnnnnnnnnnnnnnnnnnnnnnnnnnnnnnnnnnnnnnnnnnnnnnnnnnnnnnnnnnnnnnnnnnnnnnnnnnnnnnnnnnnnnnnnnnnnnnnnnnnnnnnnnnnnnnnnnnnnnnnnnnnnnnnnnnnnnnnnnnnnnnnnnnnnnnnnnnnnnnnnnnnnnnnnnnnnnnnnnnnnnnnnnnnnnnnnnnnnnnnnnnnnnnnnnnnnnnnnnnnnnnnnnnnnnnnnnnnnnnnnnnnnnnnnnnnnnnnnnnnnnnnnnnnnnnnnnnnnnnnnnnnnnnnnnnnnnnnnnnnnnnnnnnnnnnnnnnnnnnnnnnnnnnnnnnnnnnnnnnnnnnnnnnnnnnnnnnnnnnnnnnnnnnnnnnnnnnnnnnnnnnnnnnnnnnnnnnnnnnnnnnnnnnnnnnnnnnnnnnnnnnnnnnnnnnnnnnnnnnnnnnnnnnnnnnnnnnnnnnnnnnnnnnnnnnnnnnnnnnnnnnnnnnnnnnnnnnnnnnnnnnnnnnnnnnnnnnnnnnnnnnnnnnnnnnnnnnnnnnnnnnnnnnnnnnnnnnnnnnnnnnnnnnnnnnnnnnnnnnnnnnnnnnnnnnnnnnnnnnnnnnnnnnnnnnnnnnnnnnnnnnnnnnnnnnnnnnnnnnnnnnnnnnnnnnnnnnnnnnnnnnnnnnnnnnnnnnnnnnnnnnnnnnnnnnnnnnnnnnnnnnnnnnnnnnnnnnnnnnnnnnnnnnnnnnnnnnnnnnnnnnnnnnnnnnnnnnnnnnnnnnnnnnnnnnnnnnnnnnnnnnnnnnnnnnnnnnnnnnnnnnnnnnnnnnnnnnnnnnnnnnnnnnnnnnnnnnnnnnnnnnnnnnnnnnnnnnnnnnnnnnnnnnnnnnnnnnnnnnnnnnnnnnnnnnnnnnnnnnnnnnnnnnnnnnnnnnnnnnnnnnnnnnnnnnnnnnnnnnnnnnnnnnnnnnnnnnnnnnnnnnnnnnnnnnnnnnnnnnnnnnnnnnnnnnnnnnnnnnnnnnnnnnnnnnnnnnnnnnnnnnnnnnnnnnnnnnnnnnnnnnnnnnnnnnnnnnnnnnnnnnnnnnnnnnnnnnnnnnnnnnnnnnnnnnnnnnnnnnnnnnnnnnnnnnnnnnnnnnnnnnnnnnnnnnnnnnnnnnnnnnnnnnnnnnnnnnnnnnnnnnnnnnnnnnnnnnnnnnnnnnnnnnnnnnnnnnnnnnnnnnnnnnnnnnnnnnnnnnnnnnnnnnnnnnnnnnnnnnnnnnnnnnnnnnnnnnnnnnnnnnnnnnnnnnnnnnnnnnnnnnnnnnnnnnnnnnnnnnnnnnnnnnnnnnnnnnnnnnnnnnnnnnnnnnnnnnnnnnnnnnnnnnnnnnnnnnnnnnnnnnnnnnnnnnnnnnnnnnnnnnnnnnnnnnnnnnnnnnnnnnnnnnnnnnnnnnnnnnnnnnnnnnnnnnnnnnnnnnnnnnnnnnnnnnnnnnnnnnnnnnnnnnnnnnnnnnnnnnnnnnnnnnnnnnnnnnnnnnnnnnnnnnnnnnnnnnnnnnnnnnnnnnnnnnnnnnnnnnnnnnnnnnnnnnnnnnnnnnnnnnnnnnnnnnnnnnnnnnnnnnnnnnnnnnnnnnnnnnnnnnnnnnnnnnnnnnnnnnnnnnnnnnnnnnnnnnnnnnnnnnnnnnnnnnnnnnnnnnnnnnnnnnnnnnnnnnnnnnnnnnnnnnnnnnnnnnnnnnnnnnnnnnnnnnnnnnnnnnnnnnnnnnnnnnnnnnnnnnnnnnnnnnnnnnnnnnnnnnnnnnnnnnnnnnnnnnnnnnnnnnnnnnnnnnnnnnnnnnnnnnnnnnnnnnnnnnnnnnnnnnnnnnnnnnnnnnnnnnnnnnnnnnnnnnnnnnnnnnnnnnnnnnnnnnnnnnnnnnnnnnnnnnnnnnnnnnnnnnnnnnnnnnnnnnnnnnnnnnnnnnnnnnnnnnnnnnnnnnnnnnnnnnnnnnnnnnnnnnnnnnnnnnnnnnnnnnnnnnnnnnnnnnnnnnnnnnnnnnnnnnnnnnnnnnnnnnnnnnnnnnnnnnnnnnnnnnnnnnnnnnnnnnnnnnnnnnnnnnnnnnnnnnnnnnnnnnnnnnnnnnnnnnnnnnnnnnnnnnnnnnnnnnnnnnnnnnnnnnnnnnnnnnnnnnnnnnnnnnnnnnnnnnnnnnnnnnnnnnnnnnnnnnnnnnnnnnnnnnnnnnnnnnnnnnnnnnnnnnnnnnnnnnnnnnnnnnnnnnnnnnnnnnnnnnnnnnnnnnnnnnnnnnnnnnnnnnnnnnnnnnnnnnnnnnnnnnnnnnnnnnnnnnnnnnnnnnnnnnnnnnnnnnnnnnnnnnnnnnnnnnnnnnnnnnnnnnnnnnnnnnnnnnnnnnnnnnnnnnnnnnnnnnnnnnnnnnnnnnnnnnnnnnnnnnnnnnnnnnnnnnnnnnnnnnnnnnnnnnnnnnnnnnnnnnnnnnnnnnnnnnnnnnnnnnnnnnnnnnnnnnnnnnnnnnnnnnnnnnnnnnnnnnnnnnnnnnnnnnnnnnnnnnnnnnnnnnnnnnnnnnnnnnnnnnnnnnnnnnnnnnnnnnnnnnnnnnnnnnnnnnnnnnnnnnnnnnnnnnnnnnnnnnnnnnnnnnnnnnnnnnnnnnnnnnnnnnnnnnnnnnnnnnnnnnnnnnnnnnnnnnnnnnnnnnnnnnnnnnnnnnnnnnnnnnnnnnnnnnnnnnnnnnnnnnnnnnnnnnnnnnnnnnnnnnnnnnnnnnnnnnnnnnnnnnnnnnnnnnnnnnnnnnnnnnnnnnnnnnnnnnnnnnnnnnnnnnnnnnnnnnnnnnnnnnnnnnnnnnnnnnnnnnnnnnnnnnnnnnnnnnnnnnnnnnnnnnnnnnnnnnnnnnnnnnnnnnnnnnnnnnnnnnnnnnnnnnnnnnnnnnnnnnnnnnnnnnnnnnnnnnnnnnnnnnnnnnnnnnnnnnnnnnnnnnnnnnnnnnnnnnnnnnnnnnnnnnnnnnnnnnnnnnnnnnnnnnnnnnnnnnnnnnnnnnnnnnnnnnnnnnnnnnnnnnnnnnnnnnnnnnnnnnnnnnnnnnnnnnnnnnnnnnnnnnnnnnnnnnnnnnnnnnnnnnnnnnnnnnnnnnnnnnnnnnnnnnnnnnnnnnnnnnnnnnnnnnnnnnnnnnnnnnnnnnnnnnnnnnnnnnnnnnnnnnnnnnnnnnnnnnnnnnnnnnnnnnnnnnnnnnnnnnnnnnnnnnnnnnnnnnnnnnnnnnnnnnnnnnnnnnnnnnnnnnnnnnnnnnnnnnnnnnnnnnnnnnnnnnnnnnnnnnnnnnnnnnnnnnnnnnnnnnnnnnnnnnnnnnnnnnnnnnnnnnnnnnnnnnnnnnnnnnnnnnnnnnnnnnnnnnnnnnnnnnnnnnnnnnnnnnnnnnnnnnnnnnnnnnnnnnnnnnnnnnnnnnnnnnnnnnnnnnnnnnnnnnnnnnnnnnnnnnnnnnnnnnnnnnnnnnnnnnnnnnnnnnnnnnnnnnnnnnnnnnnnnnnnnnnnnnnnnnnnnnnnnnnnnnnnnnnnnnnnnnnnnnnnnnnnnnnnnnnnnnnnnnnnnnnnnnnnnnnnnnnnnnnnnnnnnnnnnnnnnnnnnnnnnnnnnnnnnnnnnnnnnnnnnnnnnnnnnnnnnnnnnnnnnnnnnnnnnnnnnnnnnnnnnnnnnnnnnnnnnnnnnnnnnnnnnnnnnnnnnnnnnnnnnnnnnnnnnnnnnnnnnnnnnnnnnnnnnnnnnnnnnnnnnnnnnnnnnnnnnnnnnnnnnnnnnnnnnnnnnnnnnnnnnnnnnnnnnnnnnnnnnnnnnnnnnnnnnnnnnnnnnnnnnnnnnnnnnnnnnnnnnnnnnnnnnnnnnnnnnnnnnnnnnnnnnnnnnnnnnnnnnnnnnnnnnnnnnnnnnnnnnnnnnnnnnnnnnnnnnnnnnnnnnnnnnnnnnnnnnnnnnnnnnnnnnnnnnnnnnnnnnnnnnnnnnnnnnnnnnnnnnnnnnnnnnnnnnnnnnnnnnnnnnnnnnnnnnnnnnnnnnnnnnnnnnnnnnnnnnnnnnnnnnnnnnnnnnnnnnnnnnnnnnnnnnnnnnnnnnnnnnnnnnnnnnnnnnnnnnnnnnnnnnnnnnnnnnnnnnnnnnnnnnnnnnnnnnnnnnnnnnnnnnnnnnnnnnnnnnnnnnnnnnnnnnnnnnnnnnnnnnnnnnnnnnnnnnnnnnnnnnnnnnnnnnnnnnnnnnnnnnnnnnnnnnnnnnnnnnnnnnnnnnnnnnnnnnnnnnnnnnnnnnnnnnnnnnnnnnnnnnnnnnnnnnnnnnnnnnnnnnnnnnnnnnnnnnnnnnnnnnnnnnnnnnnnnnnnnnnnnnnnnnnnnnnnnnnnnnnnnnnnnnnnnnnnnnnnnnnnnnnnnnnnnnnnnnnnnnnnnnnnnnnnnnnnnnnnnnnnnnnnnnnnnnnnnnnnnnnnnnnnnnnnnnnnnnnnnnnnnnnnnnnnnnnnnnnnnnnnnnnnnnnnnnnnnnnnnnnnnnnnnnnnnnnnnnnnnnnnnnnnnnnnnnnnnnnnnnnnnnnnnnnnnnnnnnnnnnnnnnnnnnnnnnnnnnnnnnnnnnnnnnnnnnnnnnnnnnnnnnnnnnnnnnnnnnnnnnnnnnnnnnnnnnnnnnnnnnnnnnnnnnnnnnnnnnnnnnnnnnnnnnnnnnnnnnnnnnnnnnnnnnnnnnnnnnnnnnnnnnnnnnnnnnnnnnnnnnnnnnnnnnnnnnnnnnnnnnnnnnnnnnnnnnnnnnnnnnnnnnnnnnnnnnnnnnnnnnnnnnnnnnnnnnnnnnnnnnnnnnnnnnnnnnnnnnnnnnnnnnnnnnnnnnnnnnnnnnnnnnnnnnnnnnnnnnnnnnnnnnnnnnnnnnnnnnnnnnnnnnnnnnnnnnnnnnnnnnnnnnnnnnnnnnnnnnnnnnnnnnnnnnnnnnnnnnnnnnnnnnnnnnnnnnnnnnnnnnnnnnnnnnnnnnnnnnnnnnnnnnnnnnnnnnnnnnnnnnnnnnnnnnnnnnnnnnnnnnnnnnnnnnnnnnnnnnnnnnnnnnnnnnnnnnnnnnnnnnnnnnnnnnnnnnnnnnnnnnnnnnnnnnnnnnnnnnnnnnnnnnnnnnnnnnnnnnnnnnnnnnnnnnnnnnnnnnnnnnnnnnnnnnnnnnnnnnnnnnnnnnnnnnnnnnnnnnnnnnnnnnnnnnnnnnnnnnnnnnnnnnnnnnnnnnnnnnnnnnnnnnnnnnnnnnnnnnnnnnnnnnnnnnnnnnnnnnnnnnnnnnnnnnnnnnnnnnnnnnnnnnnnnnnnnnnnnnnnnnnnnnnnnnnnnnnnnnnnnnnnnnnnnnnnnnnnnnnnnnnnnnnnnnnnnnnnnnnnnnnnnnnnnnnnnnnnnnnnnnnnnnnnnnnnnnnnnnnnnnnnnnnnnnnnnnnnnnnnnnnnnnnnnnnnnnnnnnnnnnnnnnnnnnnnnnnnnnnnnnnnnnnnnnnnnnnnnnnnnnnnnnnnnnnnnnnnnnnnnnnnnnnnnnnnnnnnnnnnnnnnnnnnnnnnnnnnnnnnnnnnnnnnnnnnnnnnnnnnnnnnnnnnnnnnnnnnnnnnnnnnnnnnnnnnnnnnnnnnnnnnnnnnnnnnnnnnnnnnnnnnnnnnnnnnnnnnnnnnnnnnnnnnnnnnnnnnnnnnnnnnnnnnnnnnnnnnnnnnnnnnnnnnnnnnnnnnnnnnnnnnnnnnnnnnnnnnnnnnnnnnnnnnnnnnnnnnnnnnnnnnnnnnnnnnnnnnnnnnnnnnnnnnnnnnnnnnnnnnnnnnnnnnnnnnnnnnnnnnnnnnnnnnnnnnnnnnnnnnnnnnnnnnnnnnnnnnnnnnnnnnnnnnnnnnnnnnnnnnnnnnnnnnnnnnnnnnnnnnnnnnnnnnnnnnnnnnnnnnnnnnnnnnnnnnnnnnnnnnnnnnnnnnnnnnnnnnnnnnnnnnnnnnnnnnnnnnnnnnnnnnnnnnnnnnnnnnnnnnnnnnnnnnnnnnnnnnnnnnnnnnnnnnnnnnnnnnnnnnnnnnnnnnnnnnnnnnnnnnnnnnnnnnnnnnnnnnnnnnnnnnnnnnnnnnnnnnnnnnnnnnnnnnnnnnnnnnnnnnnnnnnnnnnnnnnnnnnnnnnnnnnnnnnnnnnnnnnnnnnnnnnnnnnnnnnnnnnnnnnnnnnnnnnnnnnnnnnnnnnnnnnnnnnnnnnnnnnnnnnnnnnnnnnnnnnnnnnnnnnnnnnnnnnnnnnnnnnnnnnnnnnnnnnnnnnnnnnnnnnnnnnnnnnnnnnnnnnnnnnnnnnnnnnnnnnnnnnnnnnnnnnnnnnnnnnnnnnnnnnnnnnnnnnnnnnnnnnnnnnnnnnnnnnnnnnnnnnnnnnnnnnnnnnnnnnnnnnnnnnnnnnnnnnnnnnnnnnnnnnnnnnnnnnnnnnnnnnnnnnnnnnnnnnnnnnnnnnnnnnnnnnnnnnnnnnnnnnnnnnnnnnnnnnnnnnnnnnnnnnnnnnnnnnnnnnnnnnnnnnnnnnnnnnnnnnnnnnnnnnnnnnnnnnnnnnnnnnnnnnnnnnnnnnnnnnnnnnnnnnnnnnnnnnnnnnnnnnnnnnnnnnnnnnnnnnnnnnnnnnnnnnnnnnnnnnnnnnnnnnnnnnnnnnnnnnnnnnnnnnnnnnnnnnnnnnnnnnnnnnnnnnnnnnnnnnnnnnnnnnnnnnnnnnnnnnnnnnnnnnnnnnnnnnnnnnnnnnnnnnnnnnnnnnnnnnnnnnnnnnnnnnnnnnnnnnnnnnnnnnnnnnnnnnnnnnnnnnnnnnnnnnnnnnnnnnnnnnnnnnnnnnnnnnnnnnnnnnnnnnnnnnnnnnnnnnnnnnnnnnnnnnnnnnnnnnnnnnnnnnnnnnnnnnnnnnnnnnnnnnnnnnnnnnnnnnnnnnnnnnnnnnnnnnnnnnnnnnnnnnnnnnnnnnnnnnnnnnnnnnnnnnnnnnnnnnnnnnnnnnnnnnnnnnnnnnnnnnnnnnnnnnnnnnnnnnnnnnnnnnnnnnnnnnnnnnnnnnnnnnnnnnnnnnnnnnnnnnnnnnnnnnnnnnnnnnnnnnnnnnnnnnnnnnnnnnnnnnnnnnnnnnnnnnnnnnnnnnnnnnnnnnnnnnnnnnnnnnnnnnnnnnnnnnnnnnnnnnnnnnnnnnnnnnnnnnnnnnnnnnnnnnnnnnnnnnnnnnnnnnnnnnnnnnnnnnnnnnnnnnnnnnnnnnnnnnnnnnnnnnnnnnnnnnnnnnnnnnnnnnnnnnnnnnnnnnnnnnnnnnnnnnnnnnnnnnnnnnnnnnnnnnnnnnnnnnnnnnnnnnnnnnnnnnnnnnnnnnnnnnnnnnnnnnnnnnnnnnnnnnnnnnnnnnnnnnnnnnnnnnnnnnnnnnnnnnnnnnnnnnnnnnnnnnnnnnnnnnnnnnnnnnnnnnnnnnnnnnnnnnnnnnnnnnnnnnnnnnnnnnnnnnnnnnnnnnnnnnnnnnnnnnnnnnnnnnnnnnnnnnnnnnnnnnnnnnnnnnnnnnnnnnnnnnnnnnnnnnnnnnnnnnnnnnnnnnnnnnnnnnnnnnnnnnnnnnnnnnnnnnnnnnnnnnnnnnnnnnnnnnnnnnnnnnnnnnnnnnnnnnnnnnnnnnnnnnnnnnnnnnnnnnnnnnnnnnnnnnnnnnnnnnnnnnnnnnnnnnnnnnnnnnnnnnnnnnnnnnnnnnnnnnnnnnnnnnnnnnnnnnnnnnnnnnnnnnnnnnnnnnnnnnnnnnnnnnnnnnnnnnnnnnnnnnnnnnnnnnnnnnnnnnnnnnnnnnnnnnnnnnnnnnnnnnnnnnnnnnnnnnnnnnnnnnnnnnnnnnnnnnnnnnnnnnnnnnnnnnnnnnnnnnnnnnnnnnnnnnnnnnnnnnnnnnnnnnnnnnnnnnnnnnnnnnnnnnnnnnnnnnnnnnnnnnnnnnnnnnnnnnnnnnnnnnnnnnnnnnnnnnnnnnnnnnnnnnnnnnnnnnnnnnnnnnnnnnnnnnnnnnnnnnnnnnnnnnnnnnnnnnnnnnnnnnnnnnnnnnnnnnnnnnnnnnnnnnnnnnnnnnnnnnnnnnnnnnnnnnnnnnnnnnnnnnnnnnnnnnnnnnnnnnnnnnnnnnnnnnnnnnnnnnnnnnnnnnnnnnnnnnnnnnnnnnnnnnnnnnnnnnnnnnnnnnnnnnnnnnnnnnnnnnnnnnnnnnnnnnnnnnnnnnnnnnnnnnnnnnnnnnnnnnnnnnnnnnnnnnnnnnnnnnnnnnnnnnnnnnnnnnnnnnnnnnnnnnnnnnnnnnnnnnnnnnnnnnnnnnnnnnnnnnnnnnnnnnnnnnnnnnnnnnnnnnnnnnnnnnnnnnnnnnnnnnnnnnnnnnnnnnnnnnnnnnnnnnnnnnnnnnnnnnnnnnnnnnnnnnnnnnnnnnnnnnnnnnnnnnnnnnnnnnnnnnnnnnnnnnnnnnnnnnnnnnnnnnnnnnnnnnnnnnnnnnnnnnnnnnnnnnnnnnnnnnnnnnnnnnnnnnnnnnnnnnnnnnnnnnnnnnnnnnnnnnnnnnnnnnnnnnnnnnnnnnnnnnnnnnnnnnnnnnnnnnnnnnnnnnnnnnnnnnnnnnnnnnnnnnnnnnnnnnnnnnnnnnnnnnnnnnnnnnnnnnnnnnnnnnnnnnnnnnnnnnnnnnnnnnnnnnnnnnnnnnnnnnnnnnnnnnnnnnnnnnnnnnnnnnnnnnnnnnnnnnnnnnnnnnnnnnnnnnnnnnnnnnnnnnnnnnnnnnnnnnnnnnnnnnnnnnnnnnnnnnnnnnnnnnnnnnnnnnnnnnnnnnnnnnnnnnnnnnnnnnnnnnnnnnnnnnnnnnnnnnnnnnnnnnnnnnnnnnnnnnnnnnnnnnnnnnnnnnnnnnnnnnnnnnnnnnnnnnnnnnnnnnnnnnnnnnnnnnnnnnnnnnnnnnnnnnnnnnnnnnnnnnnnnnnnnnnnnnnnnnnnnnnnnnnnnnnnnnnnnnnnnnnnnnnnnnnnnnnnnnnnnnnnnnnnnnnnnnnnnnnnnnnnnnnnnnnnnnnnnnnnnnnnnnnnnnnnnnnnnnnnnnnnnnnnnnnnnnnnnnnnnnnnnnnnnnnnnnnnnnnnnnnnnnnnnnnnnnnnnnnnnnnnnnnnnnnnnnnnnnnnnnnnnnnnnnnnnnnnnnnnnnnnnnnnnnnnnnnnnnnnnnnnnnnnnnnnnnnnnnnnnnnnnnnnnnnnnnnnnnnnnnnnnnnnnnnnnnnnnnnnnnnnnnnnnnnnnnnnnnnnnnnnnnnnnnnnnnnnnnnnnnnnnnnnnnnnnnnnnnnnnnnnnnnnnnnnnnnnnnnnnnnnnnnnnnnnnnnnnnnnnnnnnnnnnnnnnnnnnnnnnnnnnnnnnnnnnnnnnnnnnnnnnnnnnnnnnnnnnnnnnnnnnnnnnnnnnnnnnnnnnnnnnnnnnnnnnnnnnnnnnnnnnnnnnnnnnnnnnnnnnnnnnnnnnnnnnnnnnnnnnnnnnnnnnnnnnnnnnnnnnnnnnnnnnnnnnnnnnnnnnnnnnnnnnnnnnnnnnnnnnnnnnnnnnnnnnnnnnnnnnnnnnnnnnnnnnnnnnnnnnnnnnnnnnnnnnnnnnnnnnnnnnnnnnnnnnnnnnnnnnnnnnnnnnnnnnnnnnnnnnnnnnnnnnnnnnnnnnnnnnnnnnnnnnnnnnnnnnnnnnnnnnnnnnnnnnnnnnnnnnnnnnnnnnnnnnnnnnnnnnnnnnnnnnnnnnnnnnnnnnnnnnnnnnnnnnnnnnnnnnnnnnnnnnnnnnnnnnnnnnnnnnnnnnnnnnnnnnnnnnnnnnnnnnnnnnnnnnnnnnnnnnnnnnnnnnnnnnnnnnnnnnnnnnnnnnnnnnnnnnnnnnnnnnnnnnnnnnnnnnnnnnnnnnnnnnnnnnnnnnnnnnnnnnnnnnnnnnnnnnnnnnnnnnnnnnnnnnnnnnnnnnnnnnnnnnnnnnnnnnnnnnnnnnnnnnnnnnnnnnnnnnnnnnnnnnnnnnnnnnnnnnnnnnnnnnnnnnnnnnnnnnnnnnnnnnnnnnnnnnnnnnnnnnnnnnnnnnnnnnnnnnnnnnnnnnnnnnnnnnnnnnnnnnnnnnnnnnnnnnnnnnnnnnnnnnnnnnnnnnnnnnnnnnnnnnnnnnnnnnnnnnnnnnnnnnnnnnnnnnnnnnnnnnnnnnnnnnnnnnnnnnnnnnnnnnnnnnnnnnnnnnnnnnnnnnnnnnnnnnnnnnnnnnnnnnnnnnnnnnnnnnnnnnnnnnnnnnnnnnnnnnnnnnnnnnnnnnnnnnnnnnnnnnnnnnnnnnnnnnnnnnnnnnnnnnnnnnnnnnnnnnnnnnnnnnnnnnnnnnnnnnnnnnnnnnnnnnnnnnnnnnnnnnnnnnnnnnnnnnnnnnnnnnnnnnnnnnnnnnnnnnnnnnnnnnnnnnnnnnnnnnnnnnnnnnnnnnnnnnnnnnnnnnnnnnnnnnnnnnnnnnnnnnnnnnnnnnnnnnnnnnnnnnnnnnnnnnnnnnnnnnnnnnnnnnnnnnnnnnnnnnnnnnnnnnnnnnnnnnnnnnnnnnnnnnnnnnnnnnnnnnnnnnnnnnnnnnnnnnnnnnnnnnnnnnnnnnnnnnnnnnnnnnnnnnnnnnnnnnnnnnnnnnnnnnnnnnnnnnnnnnnnnnnnnnnnnnnnnnnnnnnnnnnnnnnnnnnnnnnnnnnnnnnnnnnnnnnnnnnnnnnnnnnnnnnnnnnnnnnnnnnnnnnnnnnnnnnnnnnnnnnnnnnnnnnnnnnnnnnnnnnnnnnnnnnnnnnnnnnnnnnnnnnnnnnnnnnnnnnnnnnnnnnnnnnnnnnnnnnnnnnnnnnnnnnnnnnnnnnnnnnnnnnnnnnnnnnnnnnnnnnnnnnnnnnnnnnnnnnnnnnnnnnnnnnnnnnnnnnnnnnnnnnnnnnnnnnnnnnnnnnnnnnnnnnnnnnnnnnnnnnnnnnnnnnnnnnnnnnnnnnnnnnnnnnnnnnnnnnnnnnnnnnnnnnnnnnnnnnnnnnnnnnnnnnnnnnnnnnnnnnnnnnnnnnnnnnnnnnnnnnnnnnnnnnnnnnnnnnnnnnnnnnnnnnnnnnnnnnnnnnnnnnnnnnnnnnnnnnnnnnnnnnnnnnnnnnnnnnnnnnnnnnnnnnnnnnnnnnnnnnnnnnnnnnnnnnnnnnnnnnnnnnnnnnnnnnnnnnnnnnnnnnnnnnnnnnnnnnnnnnnnnnnnnnnnnnnnnnnnnnnnnnnnnnnnnnnnnnnnnnnnnnnnnnnnnnnnnnnnnnnnnnnnnnnnnnnnnnnnnnnnnnnnnnnnnnnnnnnnnnnnnnnnnnnnnnnnnnnnnnnnnnnnnnnnnnnnnnnnnnnnnnnnnnnnnnnnnnnnnnnnnnnnnnnnnnnnnnnnnnnnnnnnnnnnnnnnnnnnnnnnnnnnnnnnnnnnnnnnnnnnnnnnnnnnnnnnnnnnnnnnnnnnnnnnnnnnnnnnnnnnnnnnnnnnnnnnnnnnnnnnnnnnnnnnnnnnnnnnnnnnnnnnnnnnnnnnnnnnnnnnnnnnnnnnnnnnnnnnnnnnnnnnnnnnnnnnnnnnnnnnnnnnnnnnnnnnnnnnnnnnnnnnnnnnnnnnnnnnnnnnnnnnnnnnnnnnnnnnnnnnnnnnnnnnnnnnnnnnnnnnnnnnnnnnnnnnnnnnnnnnnnnnnnnnnnnnnnnnnnnnnnnnnnnnnnnnnnnnnnnnnnnnnnnnnnnnnnnnnnnnnnnnnnnnnnnnnnnnnnnnnnnnnnnnnnnnnnnnnnnnnnnnnnnnnnnnnnnnnnnnnnnnnnnnnnnnnnnnnnnnnnnnnnnnnnnnnnnnnnnnnnnnnnnnnnnnnnnnnnnnnnnnnnnnnnnnnnnnnnnnnnnnnnnnnnnnnnnnnnnnnnnnnnnnnnnnnnnnnnnnnnnnnnnnnnnnnnnnnnnnnnnnnnnnnnnnnnnnnnnnnnnnnnnnnnnnnnnnnnnnnnnnnnnnnnnnnnnnnnnnnnnnnnnnnnnnnnnnnnnnnnnnnnnnnnnnnnnnnnnnnnnnnnnnnnnnnnnnnnnnnnnnnnnnnnnnnnnnnnnnnnnnnnnnnnnnnnnnnnnnnnnnnnnnnnnnnnnnnnnnnnnnnnnnnnnnnnnnnnnnnnnnnnnnnnnnnnnnnnnnnnnnnnnnnnnnnnnnnnnnnnnnnnnnnnnnnnnnnnnnnnnnnnnnnnnnnnnnnnnnnnnnnnnnnnnnnnnnnnnnnnnnnnnnnnnnnnnnnnnnnnnnnnnnnnnnnnnnnnnnnnnnnnnnnnnnnnnnnnnnnnnnnnnnnnnnnnnnnnnnnnnnnnnnnnnnnnnnnnnnnnnnnnnnnnnnnnnnnnnnnnnnnnnnnnnnnnnnnnnnnnnnnnnnnnnnnnnnnnnnnnnnnnnnnnnnnnnnnnnnnnnnnnnnnnnnnnnnnnnnnnnnnnnnnnnnnnnnnnnnnnnnnnnnnnnnnnnnnnnnnnnnnnnnnnnnnnnnnnnnnnnnnnnnnnnnnnnnnnnnnnnnnnnnnnnnnnnnnnnnnnnnnnnnnnnnnnnnnnnnnnnnnnnnnnnnnnnnnnnnnnnnnnnnnnnnnnnnnnnnnnnnnnnnnnnnnnnnnnnnnnnnnnnnnnnnnnnnnnnnnnnnnnnnnnnnnnnnnnnnnnnnnnnnnnnnnnnnnnnnnnnnnnnnnnnnnnnnnnnnnnnnnnnnnnnnnnnnnnnnnnnnnnnnnnnnnnnnnnnnnnnnnnnnnnnnnnnnnnnnnnnnnnnnnnnnnnnnnnnnnnnnnnnnnnnnnnnnnnnnnnnnnnnnnnnnnnnnnnnnnnnnnnnnnnnnnnnnnnnnnnnnnnnnnnnnnnnnnnnnnnnnnnnnnnnnnnnnnnnnnnnnnnnnnnnnnnnnnnnnnnnnnnnnnnnnnnnnnnnnnnnnnnnnnnnnnnnnnnnnnnnnnnnnnnnnnnnnnnnnnnnnnnnnnnnnnnnnnnnnnnnnnnnnnnnnnnnnnnnnnnnnnnnnnnnnnnnnnnnnnnnnnnnnnnnnnnnnnnnnnnnnnnnnnnnnnnnnnnnnnnnnnnnnnnnnnnnnnnnnnnnnnnnnnnnnnnnnnnnnnnnnnnnnnnnnnnnnnnnnnnnnnnnnnnnnnnnnnnnnnnnnnnnnnnnnnnnnnnnnnnnnnnnnnnnnnnnnnnnnnnnnnnnnnnnnnnnnnnnnnnnnnnnnnnnnnnnnnnnnnnnnnnnnnnnnnnnnnnnnnnnnnnnnnnnnnnnnnnnnnnnnnnnnnnnnnnnnnnnnnnnnnnnnnnnnnnnnnnnnnnnnnnnnnnnnnnnnnnnnnnnnnnnnnnnnnnnnnnnnnnnnnnnnnnnnnnnnnnnnnnnnnnnnnnnnnnnnnnnnnnnnnnnnnnnnnnnnnnnnnnnnnnnnnnnnnnnnnnnnnnnnnnnnnnnnnnnnnnnnnnnnnnnnnnnnnnnnnnnnnnnnnnnnnnnnnnnnnnnnnnnnnnnnnnnnnnnnnnnnnnnnnnnnnnnnnnnnnnnnnnnnnnnnnnnnnnnnnnnnnnnnnnnnnnnnnnnnnnnnnnnnnnnnnnnnnnnnnnnnnnnnnnnnnnnnnnnnnnnnnnnnnnnnnnnnnnnnnnnnnnnnnnnnnnnnnnnnnnnnnnnnnnnnnnnnnnnnnnnnnnnnnnnnnnnnnnnnnnnnnnnnnnnnnnnnnnnnnnnnnnnnnnnnnnnnnnnnnnnnnnnnnnnnnnnnnnnnnnnnnnnnnnnnnnnnnnnnnnnnnnnnnnnnnnnnnnnnnnnnnnnnnnnnnnnnnnnnnnnnnnnnnnnnnnnnnnnnnnnnnnnnnnnnnnnnnnnnnnnnnnnnnnnnnnnnnnnnnnnnnnnnnnnnnnnnnnnnnnnnnnnnnnnnnnnnnnnnnnnnnnnnnnnnnnnnnnnnnnnnnnnnnnnnnnnnnnnnnnnnnnnnnnnnnnnnnnnnnnnnnnnnnnnnnnnnnnnnnnnnnnnnnnnnnnnnnnnnnnnnnnnnnnnnnnnnnnnnnnnnnnnnnnnnnnnnnnnnnnnnnnnnnnnnnnnnnnnnnnnnnnnnnnnnnnnnnnnnnnnnnnnnnnnnnnnnnnnnnnnnnnnnnnnnnnnnnnnnnnnnnnnnnnnnnnnnnnnnnnnnnnnnnnnnnnnnnnnnnnnnnnnnnnnnnnnnnnnnnnnnnnnnnnnnnnnnnnnnnnnnnnnnnnnnnnnnnnnnnnnnnnnnnnnnnnnnnnnnnnnnnnnnnnnnnnnnnnnnnnnnnnnnnnnnnnnnnnnnnnnnnnnnnnnnnnnnnnnnnnnnnnnnnnnnnnnnnnnnnnnnnnnnnnnnnnnnnnnnnnnnnnnnnnnnnnnnnnnnnnnnnnnnnnnnnnnnnnnnnnnnnnnnnnnnnnnnnnnnnnnnnnnnnnnnnnnnnnnnnnnnnnnnnnnnnnnnnnnnnnnnnnnnnnnnnnnnnnnnnnnnnnnnnnnnnnnnnnnnnnnnnnnnnnnnnnnnnnnnnnnnnnnnnnnnnnnnnnnnnnnnnnnnnnnnnnnnnnnnnnnnnnnnnnnnnnnnnnnnnnnnnnnnnnnnnnnnnnnnnnnnnnnnnnnnnnnnnnnnnnnnnnnnnnnnnnnnnnnnnnnnnnnnnnnnnnnnnnnnnnnnnnnnnnnnnnnnnnnnnnnnnnnnnnnnnnnnnnnnnnnnnnnnnnnnnnnnnnnnnnnnnnnnnnnnnnnnnnnnnnnnnnnnnnnnnnnnnnnnnnnnnnnnnnnnnnnnnnnnnnnnnnnnnnnnnnnnnnnnnnnnnnnnnnnnnnnnnnnnnnnnnnnnnnnnnnnnnnnnnnnnnnnnnnnnnnnnnnnnnnnnnnnnnnnnnnnnnnnnnnnnnnnnnnnnnnnnnnnnnnnnnnnnnnnnnnnnnnnnnnnnnnnnnnnnnnnnnnnnnnnnnnnnnnnnnnnnnnnnnnnnnnnnnnnnnnnnnnnnnnnnnnnnnnnnnnnnnnnnnnnnnnnnnnnnnnnnnnnnnnnnnnnnnnnnnnnnnnnnnnnnnnnnnnnnnnnnnnnnnnnnnnnnnnnnnnnnnnnnnnnnnnnnnnnnnnnnnnnnnnnnnnnnnnnnnnnnnnnnnnnnnnnnnnnnnnnnnnnnnnnnnnnnnnnnnnnnnnnnnnnnnnnnnnnnnnnnnnnnnnnnnnnnnnnnnnnnnnnnnnnnnnnnnnnnnnnnnnnnnnnnnnnnnnnnnnnnnnnnnnnnnnnnnnnnnnnnnnnnnnnnnnnnnnnnnnnnnnnnnnnnnnnnnnnnnnnnnnnnnnnnnnnnnnnnnnnnnnnnnnnnnnnnnnnnnnnnnnnnnnnnnnnnnnnnnnnnnnnnnnnnnnnnnnnnnnnnnnnnnnnnnnnnnnnnnnnnnnnnnnnnnnnnnnnnnnnnnnnnnnnnnnnnnnnnnnnnnnnnnnnnnnnnnnnnnnnnnnnnnnnnnnnnnnnnnnnnnnnnnnnnnnnnnnnnnnnnnnnnnnnnnnnnnnnnnnnnnnnnnnnnnnnnnnnnnnnnnnnnnnnnnnnnnnnnnnnnnnnnnnnnnnnnnnnnnnnnnnnnnnnnnnnnnnnnnnnnnnnnnnnnnnnnnnnnnnnnnnnnnnnnnnnnnnnnnnnnnnnnnnnnnnnnnnnnnnnnnnnnnnnnnnnnnnnnnnnnnnnnnnnnnnnnnnnnnnnnnnnnnnnnnnnnnnnnnnnnnnnnnnnnnnnnnnnnnnnnnnnnnnnnnnnnnnnnnnnnnnnnnnnnnnnnnnnnnnnnnnnnnnnnnnnnnnnnnnnnnnnnnnnnnnnnnnnnnnnnnnnnnnnnnnnnnnnnnnnnnnnnnnnnnnnnnnnnnnnnnnnnnnnnnnnnnnnnnnnnnnnnnnnnnnnnnnnnnnnnnnnnnnnnnnnnnnnnnnnnnnnnnnnnnnnnnnnnnnnnnnnnnnnnnnnnnnnnnnnnnnnnnnnnnnnnnnnnnnnnnnnnnnnnnnnnnnnnnnnnnnnnnnnnnnnnnnnnnnnnnnnnnnnnnnnnnnnnnnnnnnnnnnnnnnnnnnnnnnnnnnnnnnnnnnnnnnnnnnnnnnnnnnnnnnnnnnnnnnnnnnnnnnnnnnnnnnnnnnnnnnnnnnnnnnnnnnnnnnnnnnnnnnnnnnnnnnnnnnnnnnnnnnnnnnnnnnnnnnnnnnnnnnnnnnnnnnnnnnnnnnnnnnnnnnnnnnnnnnnnnnnnnnnnnnnnnnnnnnnnnnnnnnnnnnnnnnnnnnnnnnnnnnnnnnnnnnnnnnnnnnnnnnnnnnnnnnnnnnnnnnnnnnnnnnnnnnnnnnnnnnnnnnnnnnnnnnnnnnnnnnnnnnnnnnnnnnnnnnnnnnnnnnnnnnnnnnnnnnnnnnnnnnnnnnnnnnnnnnnnnnnnnnnnnnnnnnnnnnnnnnnnnnnnnnnnnnnnnnnnnnnnnnnnnnnnnnnnnnnnnnnnnnnnnnnnnnnnnnnnnnnnnnnnnnnnnnnnnnnnnnnnnnnnnnnnnnnnnnnnnnnnnnnnnnnnnnnnnnnnnnnnnnnnnnnnnnnnnnnnnnnnnnnnnnnnnnnnnnnnnnnnnnnnnnnnnnnnnnnnnnnnnnnnnnnnnnnnnnnnnnnnnnnnnnnnnnnnnnnnnnnnnnnnnnnnnnnnnnnnnnnnnnnnnnnnnnnnnnnnnnnnnnnnnnnnnnnnnnnnnnnnnnnnnnnnnnnnnnnnnnnnnnnnnnnnnnnnnnnnnnnnnnnnnnnnnnnnnnnnnnnnnnnnnnnnnnnnnnnnnnnnnnnnnnnnnnnnnnnnnnnnnnnnnnnnnnnnnnnnnnnnnnnnnnnnnnnnnnnnnnnnnnnnnnnnnnnnnnnnnnnnnnnnnnnnnnnnnnnnnnnnnnnnnnnnnnnnnnnnnnnnnnnnnnnnnnnnnnnnnnnnnnnnnnnnnnnnnnnnnnnnnnnnnnnnnnnnnnnnnnnnnnnnnnnnnnnnnnnnnnnnnnnnnnnnnnnnnnnnnnnnnnnnnnnnnnnnnnnnnnnnnnnnnnnnnnnnnnnnnnnnnnnnnnnnnnnnnnnnnnnnnnnnnnnnnnnnnnnnnnnnnnnnnnnnnnnnnnnnnnnnnnnnnnnnnnnnnnnnnnnnnnnnnnnnnnnnnnnnnnnnnnnnnnnnnnnnnnnnnnnnnnnnnnnnnnnnnnnnnnnnnnnnnnnnnnnnnnnnnnnnnnnnnnnnnnnnnnnnnnnnnnnnnnnnnnnnnnnnnnnnnnnnnnnnnnnnnnnnnnnnnnnnnnnnnnnnnnnnnnnnnnnnnnnnnnnnnnnnnnnnnnnnnnnnnnnnnnnnnnnnnnnnnnnnnnnnnnnnnnnnnnnnnnnnnnnnnnnnnnnnnnnnnnnnnnnnnnnnnnnnnnnnnnnnnnnnnnnnnnnnnnnnnnnnnnnnnnnnnnnnnnnnnnnnnnnnnnnnnnnnnnnnnnnnnnnnnnnnnnnnnnnnnnnnnnnnnnnnnnnnnnnnnnnnnnnnnnnnnnnnnnnnnnnnnnnnnnnnnnnnnnnnnnnnnnnnnnnnnnnnnnnnnnnnnnnnnnnnnnnnnnnnnnnnnnnnnnnnnnnnnnnnnnnnnnnnnnnnnnnnnnnnnnnnnnnnnnnnnnnnnnnnnnnnnnnnnnnnnnnnnnnnnnnnnnnnnnnnnnnnnnnnnnnnnnnnnnnnnnnnnnnnnnnnnnnnnnnnnnnnnnnnnnnnnnnnnnnnnnnnnnnnnnnnnnnnnnnnnnnnnnnnnnnnnnnnnnnnnnnnnnnnnnnnnnnnnnnnnnnnnnnnnnnnnnnnnnnnnnnnnnnnnnnnnnnnnnnnnnnnnnnnnnnnnnnnnnnnnnnnnnnnnnnnnnnnnnnnnnnnnnnnnnnnnnnnnnnnnnnnnnnnnnnnnnnnnnnnnnnnnnnnnnnnnnnnnnnnnnnnnnnnnnnnnnnnnnnnnnnnnnnnnnnnnnnnnnnnnnnnnnnnnnnnnnnnnnnnnnnnnnnnnnnnnnnnnnnnnnnnnnnnnnnnnnnnnnnnnnnnnnnnnnnnnnnnnnnnnnnnnnnnnnnnnnnnnnnnnnnnnnnnnnnnnnnnnnnnnnnnnnnnnnnnnnnnnnnnnnnnnnnnnnnnnnnnnnnnnnnnnnnnnnnnnnnnnnnnnnnnnnnnnnnnnnnnnnnnnnnnnnnnnnnnnnnnnnnnnnnnnnnnnnnnnnnnnnnnnnnnnnnnnnnnnnnnnnnnnnnnnnnnnnnnnnnnnnnnnnnnnnnnnnnnnnnnnnnnnnnnnnnnnnnnnnnnnnnnnnnnnnnnnnnnnnnnnnnnnnnnnnnnnnnnnnnnnnnnnnnnnnnnnnnnnnnnnnnnnnnnnnnnnnnnnnnnnnnnnnnnnnnnnnnnnnnnnnnnnnnnnnnnnnnnnnnnnnnnnnnnnnnnnnnnnnnnnnnnnnnnnnnnnnnnnnnnnnnnnnnnnnnnnnnnnnnnnnnnnnnnnnnnnnnnnnnnnnnnnnnnnnnnnnnnnnnnnnnnnnnnnnnnnnnnnnnnnnnnnnnnnnnnnnnnnnnnnnnnnnnnnnnnnnnnnnnnnnnnnnnnnnnnnnnnnnnnnnnnnnnnnnnnnnnnnnnnnnnnnnnnnnnnnnnnnnnnnnnnnnnnnnnnnnnnnnnnnnnnnnnnnnnnnnnnnnnnnnnnnnnnnnnnnnnnnnnnnnnnnnnnnnnnnnnnnnnnnnnnnnnnnnnnnnnnnnnnnnnnnnnnnnnnnnnnnnnnnnnnnnnnnnnnnnnnnnnnnnnnnnnnnnnnnnnnnnnnnnnnnnnnnnnnnnnnnnnnnnnnnnnnnnnnnnnnnnnnnnnnnnnnnnnnnnnnnnnnnnnnnnnnnnnnnnnnnnnnnnnnnnnnnnnnnnnnnnnnnnnnnnnnnnnnnnnnnnnnnnnnnnnnnnnnnnnnnnnnnnnnnnnnnnnnnnnnnnnnnnnnnnnnnnnnnnnnnnnnnnnnnnnnnnnnnnnnnnnnnnnnnnnnnnnnnnnnnnnnnnnnnnnnnnnnnnnnnnnnnnnnnnnnnnnnnnnnnnnnnnnnnnnnnnnnnnnnnnnnnnnnnnnnnnnnnnnnnnnnnnnnnnnnnnnnnnnnnnnnnnnnnnnnnnnnnnnnnnnnnnnnnnnnnnnnnnnnnnnnnnnnnnnnnnnnnnnnnnnnnnnnnnnnnnnnnnnnnnnnnnnnnnnnnnnnnnnnnnnnnnnnnnnnnnnnnnnnnnnnnnnnnnnnnnnnnnnnnnnnnnnnnnnnnnnnnnnnnnnnnnnnnnnnnnnnnnnnnnnnnnnnnnnnnnnnnnnnnnnnnnnnnnnnnnnnnnnnnnnnnnnnnnnnnnnnnnnnnnnnnnnnnnnnnnnnnnnnnnnnnnnnnnnnnnnnnnnnnnnnnnnnnnnnnnnnnnnnnnnnnnnnnnnnnnnnnnnnnnnnnnnnnnnnnnnnnnnnnnnnnnnnnnnnnnnnnnnnnnnnnnnnnnnnnnnnnnnnnnnnnnnnnnnnnnnnnnnnnnnnnnnnnnnnnnnnnnnnnnnnnnnnnnnnnnnnnnnnnnnnnnnnnnnnnnnnnnnnnnnnnnnnnnnnnnnnnnnnnnnnnnnnnnnnnnnnnnnnnnnnnnnnnnnnnnnnnnnnnnnnnnnnnnnnnnnnnnnnnnnnnnnnnnnnnnnnnnnnnnnnnnnnnnnnnnnnnnnnnnnnnnnnnnnnnnnnnnnnnnnnnnnnnnnnnnnnnnnnnnnnnnnnnnnnnnnnnnnnnnnnnnnnnnnnnnnnnnnnnnnnnnnnnnnnnnnnnnnnnnnnnnnnnnnnnnnnnnnnnnnnnnnnnnnnnnnnnnnnnnnnnnnnnnnnnnnnnnnnnnnnnnnnnnnnnnnnnnnnnnnnnnnnnnnnnnnnnnnnnnnnnnnnnnnnnnnnnnnnnnnnnnnnnnnnnnnnnnnnnnnnnnnnnnnnnnnnnnnnnnnnnnnnnnnnnnnnnnnnnnnnnnnnnnnnnnnnnnnnnnnnnnnnnnnnnnnnnnnnnnnnnnnnnnnnnnnnnnnnnnnnnnnnnnnnnnnnnnnnnnnnnnnnnnnnnnnnnnnnnnnnnnnnnnnnnnnnnnnnnnnnnnnnnnnnnnnnnnnnnnnnnnnnnnnnnnnnnnnnnnnnnnnnnnnnnnnnnnnnnnnnnnnnnnnnnnnnnnnnnnnnnnnnnnnnnnnnnnnnnnnnnnnnnnnnnnnnnnnnnnnnnnnnnnnnnnnnnnnnnnnnnnnnnnnnnnnnnnnnnnnnnnnnnnnnnnnnnnnnnnnnnnnnnnnnnnnnnnnnnnnnnnnnnnnnnnnnnnnnnnnnnnnnnnnnnnnnnnnnnnnnnnnnnnnnnnnnnnnnnnnnnnnnnnnnnnnnnnnnnnnnnnnnnnnnnnnnnnnnnnnnnnnnnnnnnnnnnnnnnnnnnnnnnnnnnnnnnnnnnnnnnnnnnnnnnnnnnnnnnnnnnnnnnnnnnnnnnnnnnnnnnnnnnnnnnnnnnnnnnnnnnnnnnnnnnnnnnnnnnnnnnnnnnnnnnnnnnnnnnnnnnnnnnnnnnnnnnnnnnnnnnnnnnnnnnnnnnnnnnnnnnnnnnnnnnnnnnnnnnnnnnnnnnnnnnnnnnnnnnnnnnnnnnnnnnnnnnnnnnnnnnnnnnnnnnnnnnnnnnnnnnnnnnnnnnnnnnnnnnnnnnnnnnnnnnnnnnnnnnnnnnnnnnnnnnnnnnnnnnnnnnnnnnnnnnnnnnnnnnnnnnnnnnnnnnnnnnnnnnnnnnnnnnnnnnnnnnnnnnnnnnnnnnnnnnnnnnnnnnnnnnnnnnnnnnnnnnnnnnnnnnnnnnnnnnnnnnnnnnnnnnnnnnnnnnnnnnnnnnnnnnnnnnnnnnnnnnnnnnnnnnnnnnnnnnnnnnnnnnnnnnnnnnnnnnnnnnnnnnnnnnnnnnnnnnnnnnnnnnnnnnnnnnnnnnnnnnnnnnnnnnnnnnnnnnnnnnnnnnnnnnnnnnnnnnnnnnnnnnnnnnnnnnnnnnnnnnnnnnnnnnnnnnnnnnnnnnnnnnnnnnnnnnnnnnnnnnnnnnnnnnnnnnnnnnnnnnnnnnnnnnnnnnnnnnnnnnnnnnnnnnnnnnnnnnnnnnnnnnnnnnnnnnnnnnnnnnnnnnnnnnnnnnnnnnnnnnnnnnnnnnnnnnnnnnnnnnnnnnnnnnnnnnnnnnnnnnnnnnnnnnnnnnnnnnnnnnnnnnnnnnnnnnnnnnnnnnnnnnnnnnnnnnnnnnnnnnnnnnnnnnnnnnnnnnnnnnnnnnnnnnnnnnnnnnnnnnnnnnnnnnnnnnnnnnnnnnnnnnnnnnnnnnnnnnnnnnnnnnnnnnnnnnnnnnnnnnnnnnnnnnnnnnnnnnnnnnnnnnnnnnnnnnnnnnnnnnnnnnnnnnnnnnnnnnnnnnnnnnnnnnnnnnnnnnnnnnnnnnnnnnnnnnnnnnnnnnnnnnnnnnnnnnnnnnnnnnnnnnnnnnnnnnnnnnnnnnnnnnnnnnnnnnnnnnnnnnnnnnnnnnnnnnnnnnnnnnnnnnnnnnnnnnnnnnnnnnnnnnnnnnnnnnnnnnnnnnnnnnnnnnnnnnnnnnnnnnnnnnnnnnnnnnnnnnnnnnnnnnnnnnnnnnnnnnnnnnnnnnnnnnnnnnnnnnnnnnnnnnnnnnnnnnnnnnnnnnnnnnnnnnnnnnnnnnnnnnnnnnnnnnnnnnnnnnnnnnnnnnnnnnnnnnnnnnnnnnnnnnnnnnnnnnnnnnnnnnnnnnnnnnnnnnnnnnnnnnnnnnnnnnnnnnnnnnnnnnnnnnnnnnnnnnnnnnnnnnnnnnnnnnnnnnnnnnnnnnnnnnnnnnnnnnnnnnnnnnnnnnnnnnnnnnnnnnnnnnnnnnnnnnnnnnnnnnnnnnnnnnnnnnnnnnnnnnnnnnnnnnnnnnnnnnnnnnnnnnnnnnnnnnnnnnnnnnnnnnnnnnnnnnnnnnnnnnnnnnnnnnnnnnnnnnnnnnnnnnnnnnnnnnnnnnnnnnnnnnnnnnnnnnnnnnnnnnnnnnnnnnnnnnnnnnnnnnnnnnnnnnnnnnnnnnnnnnnnnnnnnnnnnnnnnnnnnnnnnnnnnnnnnnnnnnnnnnnnnnnnnnnnnnnnnnnnnnnnnnnnnnnnnnnnnnnnnnnnnnnnnnnnnnnnnnnnnnnnnnnnnnnnnnnnnnnnnnnnnnnnnnnnnnnnnnnnnnnnnnnnnnnnnnnnnnnnnnnnnnnnnnnnnnnnnnnnnnnnnnnnnnnnnnnnnnnnnnnnnnnnnnnnnnnnnnnnnnnnnnnnnnnnnnnnnnnnnnnnnnnnnnnnnnnnnnnnnnnnnnnnnnnnnnnnnnnnnnnnnnnnnnnnnnnnnnnnnnnnnnnnnnnnnnnnnnnnnnnnnnnnnnnnnnnnnnnnnnnnnnnnnnnnnnnnnnnnnnnnnnnnnnnnnnnnnnnnnnnnnnnnnnnnnnnnnnnnnnnnnnnnnnnnnnnnnnnnnnnnnnnnnnnnnnnnnnnnnnnnnnnnnnnnnnnnnnnnnnnnnnnnnnnnnnnnnnnnnnnnnnnnnnnnnnnnnnnnnnnnnnnnnnnnnnnnnnnnnnnnnnnnnnnnnnnnnnnnnnnnnnnnnnnnnnnnnnnnnnnnnnnnnnnnnnnnnnnnnnnnnnnnnnnnnnnnnnnnnnnnnnnnnnnnnnnnnnnnnnnnnnnnnnnnnnnnnnnnnnnnnnnnnnnnnnnnnnnnnnnnnnnnnnnnnnnnnnnnnnnnnnnnnnnnnnnnnnnnnnnnnnnnnnnnnnnnnnnnnnnnnnnnnnnnnnnnnnnnnnnnnnnnnnnnnnnnnnnnnnnnnnnnnnnnnnnnnnnnnnnnnnnnnnnnnnnnnnnnnnnnnnnnnnnnnnnnnnnnnnnnnnnnnnnnnnnnnnnnnnnnnnnnnnnnnnnnnnnnnnnnnnnnnnnnnnnnnnnnnnnnnnnnnnnnnnnnnnnnnnnnnnnnnnnnnnnnnnnnnnnnnnnnnnnnnnnnnnnnnnnnnnnnnnnnnnnnnnnnnnnnnnnnnnnnnnnnnnnnnnnnnnnnnnnnnnnnnnnnnnnnnnnnnnnnnnnnnnnnnnnnnnnnnnnnnnnnnnnnnnnnnnnnnnnnnnnnnnnnnnnnnnnnnnnnnnnnnnnnnnnnnnnnnnnnnnnnnnnnnnnnnnnnnnnnnnnnnnnnnnnnnnnnnnnnnnnnnnnnnnnnnnnnnnnnnnnnnnnnnnnnnnnnnnnnnnnnnnnnnnnnnnnnnnnnnnnnnnnnnnnnnnnnnnnnnnnnnnnnnnnnnnnnnnnnnnnnnnnnnnnnnnnnnnnnnnnnnnnnnnnnnnnnnnnnnnnnnnnnnnnnnnnnnnnnnnnnnnnnnnnnnnnnnnnnnnnnnnnnnnnnnnnnnnnnnnnnnnnnnnnnnnnnnnnnnnnnnnnnnnnnnnnnnnnnnnnnnnnnnnnnnnnnnnnnnnnnnnnnnnnnnnnnnnnnnnnnnnnnnnnnnnnnnnnnnnnnnnnnnnnnnnnnnnnnnnnnnnnnnnnnnnnnnnnnnnnnnnnnnnnnnnnnnnnnnnnnnnnnnnnnnnnnnnnnnnnnnnnnnnnnnnnnnnnnnnnnnnnnnnnnnnnnnnnnnnnnnnnnnnnnnnnnnnnnnnnnnnnnnnnnnnnnnnnnnnnnnnnnnnnnnnnnnnnnnnnnnnnnnnnnnnnnnnnnnnnnnnnnnnnnnnnnnnnnnnnnnnnnnnnnnnnnnnnnnnnnnnnnnnnnnnnnnnnnnnnnnnnnnnnnnnnnnnnnnnnnnnnnnnnnnnnnnnnnnnnnnnnnnnnnnnnnnnnnnnnnnnnnnnnnnnnnnnnnnnnnnnnnnnnnnnnnnnnnnnnnnnnnnnnnnnnnnnnnnnnnnnnnnnnnnnnnnnnnnnnnnnnnnnnnnnnnnnnnnnnnnnnnnnnnnnnnnnnnnnnnnnnnnnnnnnnnnnnnnnnnnnnnnnnnnnnnnnnnnnnnnnnnnnnnnnnnnnnnnnnnnnnnnnnnnnnnnnnnnnnnnnnnnnnnnnnnnnnnnnnnnnnnnnnnnnnnnnnnnnnnnnnnnnnnnnnnnnnnnnnnnnnnnnnnnnnnnnnnnnnnnnnnnnnnnnnnnnnnnnnnnnnnnnnnnnnnnnnnnnnnnnnnnnnnnnnnnnnnnnnnnnnnnnnnnnnnnnnnnnnnnnnnnnnnnnnnnnnnnnnnnnnnnnnnnnnnnnnnnnnnnnnnnnnnnnnnnnnnnnnnnnnnnnnnnnnnnnnnnnnnnnnnnnnnnnnnnnnnnnnnnnnnnnnnnnnnnnnnnnnnnnnnnnnnnnnnnnnnnnnnnnnnnnnnnnnnnnnnnnnnnnnnnnnnnnnnnnnnnnnnnnnnnnnnnnnnnnnnnnnnnnnnnnnnnnnnnnnnnnnnnnnnnnnnnnnnnnnnnnnnnnnnnnnnnnnnnnnnnnnnnnnnnnnnnnnnnnnnnnnnnnnnnnnnnnnnnnnnnnnnnnnnnnnnnnnnnnnnnnnnnnnnnnnnnnnnnnnnnnnnnnnnnnnnnnnnnnnnnnnnnnnnnnnnnnnnnnnnnnnnnnnnnnnnnnnnnnnnnnnnnnnnnnnnnnnnnnnnnnnnnnnnnnnnnnnnnnnnnnnnnnnnnnnnnnnnnnnnnnnnnnnnnnnnnnnnnnnnnnnnnnnnnnnnnnnnnnnnnnnnnnnnnnnnnnnnnnnnnnnnnnnnnnnnnnnnnnnnnnnnnnnnnnnnnnnnnnnnnnnnnnnnnnnnnnnnnnnnnnnnnnnnnnnnnnnnnnnnnnnnnnnnnnnnnnnnnnnnnnnnnnnnnnnnnnnnnnnnnnnnnnnnnnnnnnnnnnnnnnnnnnnnnnnnnnnnnnnnnnnnnnnnnnnnnnnnnnnnnnnnnnnnnnnnnnnnnnnnnnnnnnnnnnnnnnnnnnnnnnnnnnnnnnnnnnnnnnnnnnnnnnnnnnnnnnnnnnnnnnnnnnnnnnnnnnnnnnnnnnnnnnnnnnnnnnnnnnnnnnnnnnnnnnnnnnnnnnnnnnnnnnnnnnnnnnnnnnnnnnnnnnnnnnnnnnnnnnnnnnnnnnnnnnnnnnnnnnnnnnnnnnnnnnnnnnnnnnnnnnnnnnnnnnnnnnnnnnnnnnnnnnnnnnnnnnnnnnnnnnnnnnnnnnnnnnnnnnnnnnnnnnnnnnnnnnnnnnnnnnnnnnnnnnnnnnnnnnnnnnnnnnnnnnnnnnnnnnnnnnnnnnnnnnnnnnnnnnnnnnnnnnnnnnnnnnnnnnnnnnnnnnnnnnnnnnnnnnnnnnnnnnnnnnnnnnnnnnnnnnnnnnnnnnnnnnnnnnnnnnnnnnnnnnnnnnnnnnnnnnnnnnnnnnnnnnnnnnnnnnnnnnnnnnnnnnnnnnnnnnnnnnnnnnnnnnnnnnnnnnnnnnnnnnnnnnnnnnnnnnnnnnnnnnnnnnnnnnnnnnnnnnnnnnnnnnnnnnnnnnnnnnnnnnnnnnnnnnnnnnnnnnnnnnnnnnnnnnnnnnnnnnnnnnnnnnnnnnnnnnnnnnnnnnnnnnnnnnnnnnnnnnnnnnnnnnnnnnnnnnnnnnnnnnnnnnnnnnnnnnnnnnnnnnnnnnnnnnnnnnnnnnnnnnnnnnnnnnnnnnnnnnnnnnnnnnnnnnnnnnnnnnnnnnnnnnnnnnnnnnnnnnnnnnnnnnnnnnnnnnnnnnnnnnnnnnnnnnnnnnnnnnnnnnnnnnnnnnnnnnnnnnnnnnnnnnnnnnnnnnnnnnnnnnnnnnnnnnnnnnnnnnnnnnnnnnnnnnnnnnnnnnnnnnnnnnnnnnnnnnnnnnnnnnnnnnnnnnnnnnnnnnnnnnnnnnnnnnnnnnnnnnnnnnnnnnnnnnnnnnnnnnnnnnnnnnnnnnnnnnnnnnnnnnnnnnnnnnnnnnnnnnnnnnnnnnnnnnnnnnnnnnnnnnnnnnnnnnnnnnnnnnnnnnnnnnnnnnnnnnnnnnnnnnnnnnnnnnnnnnnnnnnnnnnnnnnnnnnnnnnnnnnnnnnnnnnnnnnnnnnnnnnnnnnnnnnnnnnnnnnnnnnnnnnnnnnnnnnnnnnnnnnnnnnnnnnnnnnnnnnnnnnnnnnnnnnnnnnnnnnnnnnnnnnnnnnnnnnnnnnnnnnnnnnnnnnnnnnnnnnnnnnnnnnnnnnnnnnnnnnnnnnnnnnnnnnnnnnnnnnnnnnnnnnnnnnnnnnnnnnnnnnnnnnnnnnnnnnnnnnnnnnnnnnnnnnnnnnnnnnnnnnnnnnnnnnnnnnnnnnnnnnnnnnnnnnnnnnnnnnnnnnnnnnnnnnnnnnnnnnnnnnnnnnnnnnnnnnnnnnnnnnnnnnnnnnnnnnnnnnnnnnnnnnnnnnnnnnnnnnnnnnnnnnnnnnnnnnnnnnnnnnnnnnnnnnnnnnnnnnnnnnnnnnnnnnnnnnnnnnnnnnnnnnnnnnnnnnnnnnnnnnnnnnnnnnnnnnnnnnnnnnnnnnnnnnnnnnnnnnnnnnnnnnnnnnnnnnnnnnnnnnnnnnnnnnnnnnnnnnnnnnnnnnnnnnnnnnnnnnnnnnnnnnnnnnnnnnnnnnnnnnnnnnnnnnnnnnnnnnnnnnnnnnnnnnnnnnnnnnnnnnnnnnnnnnnnnnnnnnnnnnnnnnnnnnnnnnnnnnnnnnnnnnnnnnnnnnnnnnnnnnnnnnnnnnnnnnnnnnnnnnnnnnnnnnnnnnnnnnnnnnnnnnnnnnnnnnnnnnnnnnnnnnnnnnnnnnnnnnnnnnnnnnnnnnnnnnnnnnnnnnnnnnnnnnnnnnnnnnnnnnnnnnnnnnnnnnnnnnnnnnnnnnnnnnnnnnnnnnnnnnnnnnnnnnnnnnnnnnnnnnnnnnnnnnnnnnnnnnnnnnnnnnnnnnnnnnnnnnnnnnnnnnnnnnnnnnnnnnnnnnnnnnnnnnnnnnnnnnnnnnnnnnnnnnnnnnnnnnnnnnnnnnnnnnnnnnnnnnnnnnnnnnnnnnnnnnnnnnnnnnnnnnnnnnnnnnnnnnnnnnnnnnnnnnnnnnnnnnnnnnnnnnnnnnnnnnnnnnnnnnnnnnnnnnnnnnnnnnnnnnnnnnnnnnnnnnnnnnnnnnnnnnnnnnnnnnnnnnnnnnnnnnnnnnnnnnnnnnnnnnnnnnnnnnnnnnnnnnnnnnnnnnnnnnnnnnnnnnnnnnnnnnnnnnnnnnnnnnnnnnnnnnnnnnnnnnnnnnnnnnnnnnnnnnnnnnnnnnnnnnnnnnnnnnnnnnnnnnnnnnnnnnnnnnnnnnnnnnnnnnnnnnnnnnnnnnnnnnnnnnnnnnnnnnnnnnnnnnnnnnnnnnnnnnnnnnnnnnnnnnnnnnnnnnnnnnnnnnnnnnnnnnnnnnnnnnnnnnnnnnnnnnnnnnnnnnnnnnnnnnnnnnnnnnnnnnnnnnnnnnnnnnnnnnnnnnnnnnnnnnnnnnnnnnnnnnnnnnnnnnnnnnnnnnnnnnnnnnnnnnnnnnnnnnnnnnnnnnnnnnnnnnnnnnnnnnnnnnnnnnnnnnnnnnnnnnnnnnnnnnnnnnnnnnnnnnnnnnnnnnnnnnnnnnnnnnnnnnnnnnnnnnnnnnnnnnnnnnnnnnnnnnnnnnnnnnnnnnnnnnnnnnnnnnnnnnnnnnnnnnnnnnnnnnnnnnnnnnnnnnnnnnnnnnnnnnnnnnnnnnnnnnnnnnnnnnnnnnnnnnnnnnnnnnnnnnnnnnnnnnnnnnnnnnnnnnnnnnnnnnnnnnnnnnnnnnnnnnnnnnnnnnnnnnnnnnnnnnnnnnnnnnnnnnnnnnnnnnnnnnnnnnnnnnnnnnnnnnnnnnnnnnnnnnnnnnnnnnnnnnnnnnnnnnnnnnnnnnnnnnnnnnnnnnnnnnnnnnnnnnnnnnnnnnnnnnnnnnnnnnnnnnnnnnnnnnnnnnnnnnnnnnnnnnnnnnnnnnnnnnnnnnnnnnnnnnnnnnnnnnnnnnnnnnnnnnnnnnnnnnnnnnnnnnnnnnnnnnnnnnnnnnnnnnnnnnnnnnnnnnnnnnnnnnnnnnnnnnnnnnnnnnnnnnnnnnnnnnnnnnnnnnnnnnnnnnnnnnnnnnnnnnnnnnnnnnnnnnnnnnnnnnnnnnnnnnnnnnnnnnnnnnnnnnnnnnnnnnnnnnnnnnnnnnnnnnnnnnnnnnnnnnnnnnnnnnnnnnnnnnnnnnnnnnnnnnnnnnnnnnnnnnnnnnnnnnnnnnnnnnnnnnnnnnnnnnnnnnnnnnnnnnnnnnnnnnnnnnnnnnnnnnnnnnnnnnnnnnnnnnnnnnnnnnnnnnnnnnnnnnnnnnnnnnnnnnnnnnnnnnnnnnnnnnnnnnnnnnnnnnnnnnnnnnnnnnnnnnnnnnnnnnnnnnnnnnnnnnnnnnnnnnnnnnnnnnnnnnnnnnnnnnnnnnnnnnnnnnnnnnnnnnnnnnnnnnnnnnnnnnnnnnnnnnnnnnnnnnnnnnnnnnnnnnnnnnnnnnnnnnnnnnnnnnnnnnnnnnnnnnnnnnnnnnnnnnnnnnnnnnnnnnnnnnnnnnnnnnnnnnnnnnnnnnnnnnnnnnnnnnnnnnnnnnnnnnnnnnnnnnnnnnnnnnnnnnnnnnnnnnnnnnnnnnnnnnnnnnnnnnnnnnnnnnnnnnnnnnnnnnnnnnnnnnnnnnnnnnnnnnnnnnnnnnnnnnnnnnnnnnnnnnnnnnnnnnnnnnnnnnnnnnnnnnnnnnnnnnnnnnnnnnnnnnnnnnnnnnnnnnnnnnnnnnnnnnnnnnnnnnnnnnnnnnnnnnnnnnnnnnnnnnnnnnnnnnnnnnnnnnnnnnnnnnnnnnnnnnnnnnnnnnnnnnnnnnnnnnnnnnnnnnnnnnnnnnnnnnnnnnnnnnnnnnnnnnnnnnnnnnnnnnnnnnnnnnnnnnnnnnnnnnnnnnnnnnnnnnnnnnnnnnnnnnnnnnnnnnnnnnnnnnnnnnnnnnnnnnnnnnnnnnnnnnnnnnnnnnnnnnnnnnnnnnnnnnnnnnnnnnnnnnnnnnnnnnnnnnnnnnnnnnnnnnnnnnnnnnnnnnnnnnnnnnnnnnnnnnnnnnnnnnnnnnnnnnnnnnnnnnnnnnnnnnnnnnnnnnnnnnnnnnnnnnnnnnnnnnnnnnnnnnnnnnnnnnnnnnnnnnnnnnnnnnnnnnnnnnnnnnnnnnnnnnnnnnnnnnnnnnnnnnnnnnnnnnnnnnnnnnnnnnnnnnnnnnnnnnnnnnnnnnnnnnnnnnnnnnnnnnnnnnnnnnnnnnnnnnnnnnnnnnnnnnnnnnnnnnnnnnnnnnnnnnnnnnnnnnnnnnnnnnnnnnnnnnnnnnnnnnnnnnnnnnnnnnnnnnnnnnnnnnnnnnnnnnnnnnnnnnnnnnnnnnnnnnnnnnnnnnnnnnnnnnnnnnnnnnnnnnnnnnnnnnnnnnnnnnnnnnnnnnnnnnnnnnnnnnnnnnnnnnnnnnnnnnnnnnnnnnnnnnnnnnnnnnnnnnnnnnnnnnnnnnnnnnnnnnnnnnnnnnnnnnnnnnnnnnnnnnnnnnnnnnnnnnnnnnnnnnnnnnnnnnnnnnnnnnnnnnnnnnnnnnnnnnnnnnnnnnnnnnnnnnnnnnnnnnnnnnnnnnnnnnnnnnnnnnnnnnnnnnnnnnnnnnnnnnnnnnnnnnnnnnnnnnnnnnnnnnnnnnnnnnnnnnnnnnnnnnnnnnnnnnnnnnnnnnnnnnnnnnnnnnnnnnnnnnnnnnnnnnnnnnnnnnnnnnnnnnnnnnnnnnnnnnnnnnnnnnnnnnnnnnnnnnnnnnnnnnnnnnnnnnnnnnnnnnnnnnnnnnnnnnnnnnnnnnnnnnnnnnnnnnnnnnnnnnnnnnnnnnnnnnnnnnnnnnnnnnnnnnnnnnnnnnnnnnnnnnnnnnnnnnnnnnnnnnnnnnnnnnnnnnnnnnnnnnnnnnnnnnnnnnnnnnnnnnnnnnnnnnnnnnnnnnnnnnnnnnnnnnnnnnnnnnnnnnnnnnnnnnnnnnnnnnnnnnnnnnnnnnnnnnnnnnnnnnnnnnnnnnnnnnnnnnnnnnnnnnnnnnnnnnnnnnnnnnnnnnnnnnnnnnnnnnnnnnnnnnnnnnnnnnnnnnnnnnnnnnnnnnnnnnnnnnnnnnnnnnnnnnnnnnnnnnnnnnnnnnnnnnnnnnnnnnnnnnnnnnnnnnnnnnnnnnnnnnnnnnnnnnnnnnnnnnnnnnnnnnnnnnnnnnnnnnnnnnnnnnnnnnnnnnnnnnnnnnnnnnnnnnnnnnnnnnnnnnnnnnnnnnnnnnnnnnnnnnnnnnnnnnnnnnnnnnnnnnnnnnnnnnnnnnnnnnnnnnnnnnnnnnnnnnnnnnnnnnnnnnnnnnnnnnnnnnnnnnnnnnnnnnnnnnnnnnnnnnnnnnnnnnnnnnnnnnnnnnnnnnnnnnnnnnnnnnnnnnnnnnnnnnnnnnnnnnnnnnnnnnnnnnnnnnnnnnnnnnnnnnnnnnnnnnnnnnnnnnnnnnnnnnnnnnnnnnnnnnnnnnnnnnnnnnnnnnnnnnnnnnnnnnnnnnnnnnnnnnnnnnnnnnnnnnnnnnnnnnnnnnnnnnnnnnnnnnnnnnnnnnnnnnnnnnnnnnnnnnnnnnnnnnnnnnnnnnnnnnnnnnnnnnnnnnnnnnnnnnnnnnnnnnnnnnnnnnnnnnnnnnnnnnnnnnnnnnnnnnnnnnnnnnnnnnnnnnnnnnnnnnnnnnnnnnnnnnnnnnnnnnnnnnnnnnnnnnnnnnnnnnnnnnnnnnnnnnnnnnnnnnnnnnnnnnnnnnnnnnnnnnnnnnnnnnnnnnnnnnnnnnnnnnnnnnnnnnnnnnnnnnnnnnnnnnnnnnnnnnnnnnnnnnnnnnnnnnnnnnnnnnnnnnnnnnnnnnnnnnnnnnnnnnnnnnnnnnnnnnnnnnnnnnnnnnnnnnnnnnnnnnnnnnnnnnnnnnnnnnnnnnnnnnnnnnnnnnnnnnnnnnnnnnnnnnnnnnnnnnnnnnnnnnnnnnnnnnnnnnnnnnnnnnnnnnnnnnnnnnnnnnnnnnnnnnnnnnnnnnnnnnnnnnnnnnnnnnnnnnnnnnnnnnnnnnnnnnnnnnnnnnnnnnnnnnnnnnnnnnnnnnnnnnnnnnnnnnnnnnnnnnnnnnnnnnnnnnnnnnnnnnnnnnnnnnnnnnnnnnnnnnnnnnnnnnnnnnnnnnnnnnnnnnnnnnnnnnnnnnnnnnnnnnnnnnnnnnnnnnnnnnnnnnnnnnnnnnnnnnnnnnnnnnnnnnnnnnnnnnnnnnnnnnnnnnnnnnnnnnnnnnnnnnnnnnnnnnnnnnnnnnnnnnnnnnnnnnnnnnnnnnnnnnnnnnnnnnnnnnnnnnnnnnnnnnnnnnnnnnnnnnnnnnnnnnnnnnnnnnnnnnnnnnnnnnnnnnnnnnnnnnnnnnnnnnnnnnnnnnnnnnnnnnnnnnnnnnnnnnnnnnnnnnnnnnnnnnnnnnnnnnnnnnnnnnnnnnnnnnnnnnnnnnnnnnnnnnnnnnnnnnnnnnnnnnnnnnnnnnnnnnnnnnnnnnnnnnnnnnnnnnnnnnnnnnnnnnnnnnnnnnnnnnnnnnnnnnnnnnnnnnnnnnnnnnnnnnnnnnnnnnnnnnnnnnnnnnnnnnnnnnnnnnnnnnnnnnnnnnnnnnnnnnnnnnnnnnnnnnnnnnnnnnnnnnnnnnnnnnnnnnnnnnnnnnnnnnnnnnnnnnnnnnnnnnnnnnnnnnnnnnnnnnnnnnnnnnnnnnnnnnnnnnnnnnnnnnnnnnnnnnnnnnnnnnnnnnnnnnnnnnnnnnnnnnnnnnnnnnnnnnnnnnnnnnnnnnnnnnnnnnnnnnnnnnnnnnnnnnnnnnnnnnnnnnnnnnnnnnnnnnnnnnnnnnnnnnnnnnnnnnnnnnnnnnnnnnnnnnnnnnnnnnnnnnnnnnnnnnnnnnnnnnnnnnnnnnnnnnnnnnnnnnnnnnnnnnnnnnnnnnnnnnnnnnnnnnnnnnnnnnnnnnnnnnnnnnnnnnnnnnnnnnnnnnnnnnnnnnnnnnnnnnnnnnnnnnnnnnnnnnnnnnnnnnnnnnnnnnnnnnnnnnnnnnnnnnnnnnnnnnnnnnnnnnnnnnnnnnnnnnnnnnnnnnnnnnnnnnnnnnnnnnnnnnnnnnnnnnnnnnnnnnnnnnnnnnnnnnnnnnnnnnnnnnnnnnnnnnnnnnnnnnnnnnnnnnnnnnnnnnnnnnnnnnnnnnnnnnnnnnnnnnnnnnnnnnnnnnnnnnnnnnnnnnnnnnnnnnnnnnnnnnnnnnnnnnnnnnnnnnnnnnnnnnnnnnnnnnnnnnnnnnnnnnnnnnnnnnnnnnnnnnnnnnnnnnnnnnnnnnnnnnnnnnnnnnnnnnnnnnnnnnnnnnnnnnnnnnnnnnnnnnnnnnnnnnnnnnnnnnnnnnnnnnnnnnnnnnnnnnnnnnnnnnnnnnnnnnnnnnnnnnnnnnnnnnnnnnnnnnnnnnnnnnnnnnnnnnnnnnnnnnnnnnnnnnnnnnnnnnnnnnnnnnnnnnnnnnnnnnnnnnnnnnnnnnnnnnnnnnnnnnnnnnnnnnnnnnnnnnnnnnnnnnnnnnnnnnnnnnnnnnnnnnnnnnnnnnnnnnnnnnnnnnnnnnnnnnnnnnnnnnnnnnnnnnnnnnnnnnnnnnnnnnnnnnnnnnnnnnnnnnnnnnnnnnnnnnnnnnnnnnnnnnnnnnnnnnnnnnnnnnnnnnnnnnnnnnnnnnnnnnnnnnnnnnnnnnnnnnnnnnnnnnnnnnnnnnnnnnnnnnnnnnnnnnnnnnnnnnnnnnnnnnnnnnnnnnnnnnnnnnnnnnnnnnnnnnnnnnnnnnnnnnnnnnnnnnnnnnnnnnnnnnnnnnnnnnnnnnnnnnnnnnnnnnnnnnnnnnnnnnnnnnnnnnnnnnnnnnnnnnnnnnnnnnnnnnnnnnnnnnnnnnnnnnnnnnnnnnnnnnnnnnnnnnnnnnnnnnnnnnnnnnnnnnnnnnnnnnnnnnnnnnnnnnnnnnnnnnnnnnnnnnnnnnnnnnnnnnnnnnnnnnnnnnnnnnnnnnnnnnnnnnnnnnnnnnnnnnnnnnnnnnnnnnnnnnnnnnnnnnnnnnnnnnnnnnnnnnnnnnnnnnnnnnnnnnnnnnnnnnnnnnnnnnnnnnnnnnnnnnnnnnnnnnnnnnnnnnnnnnnnnnnnnnnnnnnnnnnnnnnnnnnnnnnnnnnnnnnnnnnnnnnnnnnnnnnnnnnnnnnnnnnnnnnnnnnnnnnnnnnnnnnnnnnnnnnnnnnnnnnnnnnnnnnnnnnnnnnnnnnnnnnnnnnnnnnnnnnnnnnnnnnnnnnnnnnnnnnnnnnnnnnnnnnnnnnnnnnnnnnnnnnnnnnnnnnnnnnnnnnnnnnnnnnnnnnnnnnnnnnnnnnnnnnnnnnnnnnnnnnnnnnnnnnnnnnnnnnnnnnnnnnnnnnnnnnnnnnnnnnnnnnnnnnnnnnnnnnnnnnnnnnnnnnnnnnnnnnnnnnnnnnnnnnnnnnnnnnnnnnnnnnnnnnnnnnnnnnnnnnnnnnnnnnnnnnnnnnnnnnnnnnnnnnnnnnnnnnnnnnnnnnnnnnnnnnnnnnnnnnnnnnnnnnnnnnnnnnnnnnnnnnnnnnnnnnnnnnnnnnnnnnnnnnnnnnnnnnnnnnnnnnnnnnnnnnnnnnnnnnnnnnnnnnnnnnnnnnnnnnnnnnnnnnnnnnnnnnnnnnnnnnnnnnnnnnnnnnnnnnnnnnnnnnnnnnnnnnnnnnnnnnnnnnnnnnnnnnnnnnnnnnnnnnnnnnnnnnnnnnnnnnnnnnnnnnnnnnnnnnnnnnnnnnnnnnnnnnnnnnnnnnnnnnnnnnnnnnnnnnnnnnnnnnnnnnnnnnnnnnnnnnnnnnnnnnnnnnnnnnnnnnnnnnnnnnnnnnnnnnnnnnnnnnnnnnnnnnnnnnnnnnnnnnnnnnnnnnnnnnnnnnnnnnnnnnnnnnnnnnnnnnnnnnnnnnnnnnnnnnnnnnnnnnnnnnnnnnnnnnnnnnnnnnnnnnnnnnnnnnnnnnnnnnnnnnnnnnnnnnnnnnnnnnnnnnnnnnnnnnnnnnnnnnnnnnnnnnnnnnnnnnnnnnnnnnnnnnnnnnnnnnnnnnnnnnnnnnnnnnnnnnnnnnnnnnnnnnnnnnnnnnnnnnnnnnnnnnnnnnnnnnnnnnnnnnnnnnnnnnnnnnnnnnnnnnnnnnnnnnnnnnnnnnnnnnnnnnnnnnnnnnnnnnnnnnnnnnnnnnnnnnnnnnnnnnnnnnnnnnnnnnnnnnnnnnnnnnnnnnnnnnnnnnnnnnnnnnnnnnnnnnnnnnnnnnnnnnnnnnnnnnnnnnnnnnnnnnnnnnnnnnnnnnnnnnnnnnnnnnnnnnnnnnnnnnnnnnnnnnnnnnnnnnnnnnnnnnnnnnnnnnnnnnnnnnnnnnnnnnnnnnnnnnnnnnnnnnnnnnnnnnnnnnnnnnnnnnnnnnnnnnnnnnnnnnnnnnnnnnnnnnnnnnnnnnnnnnnnnnnnnnnnnnnnnnnnnnnnnnnnnnnnnnnnnnnnnnnnnnnnnnnnnnnnnnnnnnnnnnnnnnnnnnnnnnnnnnnnnnnnnnnnnnnnnnnnnnnnnnnnnnnnnnnnnnnnnnnnnnnnnnnnnnnnnnnnnnnnnnnnnnnnnnnnnnnnnnnnnnnnnnnnnnnnnnnnnnnnnnnnnnnnnnnnnnnnnnnnnnnnnnnnnnnnnnnnnnnnnnnnnnnnnnnnnnnnnnnnnnnnnnnnnnnnnnnnnnnnnnnnnnnnnnnnnnnnnnnnnnnnnnnnnnnnnnnnnnnnnnnnnnnnnnnnnnnnnnnnnnnnnnnnnnnnnnnnnnnnnnnnnnnnnnnnnnnnnnnnnnnnnnnnnnnnnnnnnnnnnnnnnnnnnnnnnnnnnnnnnnnnnnnnnnnnnnnnnnnnnnnnnnnnnnnnnnnnnnnnnnnnnnnnnnnnnnnnnnnnnnnnnnnnnnnnnnnnnnnnnnnnnnnnnnnnnnnnnnnnnnnnnnnnnnnnnnnnnnnnnnnnnnnnnnnnnnnnnnnnnnnnnnnnnnnnnnnnnnnnnnnnnnnnnnnnnnnnnnnnnnnnnnnnnnnnnnnnnnnnnnnnnnnnnnnnnnnnnnnnnnnnnnnnnnnnnnnnnnnnnnnnnnnnnnnnnnnnnnnnnnnnnnnnnnnnnnnnnnnnnnnnnnnnnnnnnnnnnnnnnnnnnnnnnnnnnnnnnnnnnnnnnnnnnnnnnnnnnnnnnnnnnnnnnnnnnnnnnnnnnnnnnnnnnnnnnnnnnnnnnnnnnnnnnnnnnnnnnnnnnnnnnnnnnnnnnnnnnnnnnnnnnnnnnnnnnnnnnnnnnnnnnnnnnnnnnnnnnnnnnnnnnnnnnnnnnnnnnnnnnnnnnnnnnnnnnnnnnnnnnnnnnnnnnnnnnnnnnnnnnnnnnnnnnnnnnnnnnnnnnnnnnnnnnnnnnnnnnnnnnnnnnnnnnnnnnnnnnnnnnnnnnnnnnnnnnnnnnnnnnnnnnnnnnnnnnnnnnnnnnnnnnnnnnnnnnnnnnnnnnnnnnnnnnnnnnnnnnnnnnnnnnnnnnnnnnnnnnnnnnnnnnnnnnnnnnnnnnnnnnnnnnnnnnnnnnnnnnnnnnnnnnnnnnnnnnnnnnnnnnnnnnnnnnnnnnnnnnnnnnnnnnnnnnnnnnnnnnnnnnnnnnnnnnnnnnnnnnnnnnnnnnnnnnnnnnnnnnnnnnnnnnnnnnnnnnnnnnnnnnnnnnnnnnnnnnnnnnnnnnnnnnnnnnnnnnnnnnnnnnnnnnnnnnnnnnnnnnnnnnnnnnnnnnnnnnnnnnnnnnnnnnnnnnnnnnnnnnnnnnnnnnnnnnnnnnnnnnnnnnnnnnnnnnnnnnnnnnnnnnnnnnnnnnnnnnnnnnnnnnnnnnnnnnnnnnnnnnnnnnnnnnnnnnnnnnnnnnnnnnnnnnnnnnnnnnnnnnnnnnnnnnnnnnnnnnnnnnnnnnnnnnnnnnnnnnnnnnnnnnnnnnnnnnnnnnnnnnnnnnnnnnnnnnnnnnnnnnnnnnnnnnnnnnnnnnnnnnnnnnnnnnnnnnnnnnnnnnnnnnnnnnnnnnnnnnnnnnnnnnnnnnnnnnnnnnnnnnnnnnnnnnnnnnnnnnnnnnnnnnnnnnnnnnnnnnnnnnnnnnnnnnnnnnnnnnnnnnnnnnnnnnnnnnnnnnnnnnnnnnnnnnnnnnnnnnnnnnnnnnnnnnnnnnnnnnnnnnnnnnnnnnnnnnnnnnnnnnnnnnnnnnnnnnnnnnnnnnnnnnnnnnnnnnnnnnnnnnnnnnnnnnnnnnnnnnnnnnnnnnnnnnnnnnnnnnnnnnnnnnnnnnnnnnnnnnnnnnnnnnnnnnnnnnnnnnnnnnnnnnnnnnnnnnnnnnnnnnnnnnnnnnnnnnnnnnnnnnnnnnnnnnnnnnnnnnnnnnnnnnnnnnnnnnnnnnnnnnnnnnnnnnnnnnnnnnnnnnnnnnnnnnnnnnnnnnnnnnnnnnnnnnnnnnnnnnnnnnnnnnnnnnnnnnnnnnnnnnnnnnnnnnnnnnnnnnnnnnnnnnnnnnnnnnnnnnnnnnnnnnnnnnnnnnnnnnnnnnnnnnnnnnnnnnnnnnnnnnnnnnnnnnnnnnnnnnnnnnnnnnnnnnnnnnnnnnnnnnnnnnnnnnnnnnnnnnnnnnnnnnnnnnnnnnnnnnnnnnnnnnnnnnnnnnnnnnnnnnnnnnnnnnnnnnnnnnnnnnnnnnnnnnnnnnnnnnnnnnnnnnnnnnnnnnnnnnnnnnnnnnnnnnnnnnnnnnnnnnnnnnnnnnnnnnnnnnnnnnnnnnnnnnnnnnnnnnnnnnnnnnnnnnnnnnnnnnnnnnnnnnnnnnnnnnnnnnnnnnnnnnnnnnnnnnnnnnnnnnnnnnnnnnnnnnnnnnnnnnnnnnnnnnnnnnnnnnnnnnnnnnnnnnnnnnnnnnnnnnnnnnnnnnnnnnnnnnnnnnnnnnnnnnnnnnnnnnnnnnnnnnnnnnnnnnnnnnnnnnnnnnnnnnnnnnnnnnnnnnnnnnnnnnnnnnnnnnnnnnnnnnnnnnnnnnnnnnnnnnnnnnnnnnnnnnnnnnnnnnnnnnnnnnnnnnnnnnnnnnnnnnnnnnnnnnnnnnnnnnnnnnnnnnnnnnnnnnnnnnnnnnnnnnnnnnnnnnnnnnnnnnnnnnnnnnnnnnnnnnnnnnnnnnnnnnnnnnnnnnnnnnnnnnnnnnnnnnnnnnnnnnnnnnnnnnnnnnnnnnnnnnnnnnnnnnnnnnnnnnnnnnnnnnnnnnnnnnnnnnnnnnnnnnnnnnnnnnnnnnnnnnnnnnnnnnnnnnnnnnnnnnnnnnnnnnnnnnnnnnnnnnnnnnnnnnnnnnnnnnnnnnnnnnnnnnnnnnnnnnnnnnnnnnnnnnnnnnnnnnnnnnnnnnnnnnnnnnnnnnnnnnnnnnnnnnnnnnnnnnnnnnnnnnnnnnnnnnnnnnnnnnnnnnnnnnnnnnnnnnnnnnnnnnnnnnnnnnnnnnnnnnnnnnnnnnnnnnnnnnnnnnnnnnnnnnnnnnnnnnnnnnnnnnnnnnnnnnnnnnnnnnnnnnnnnnnnnnnnnnnnnnnnnnnnnnnnnnnnnnnnnnnnnnnnnnnnnnnnnnnnnnnnnnnnnnnnnnnnnnnnnnnnnnnnnnnnnnnnnnnnnnnnnnnnnnnnnnnnnnnnnnnnnnnnnnnnnnnnnnnnnnnnnnnnnnnnnnnnnnnnnnnnnnnnnnnnnnnnnnnnnnnnnnnnnnnnnnnnnnnnnnnnnnnnnnnnnnnnnnnnnnnnnnnnnnnnnnnnnnnnnnnnnnnnnnnnnnnnnnnnnnnnnnnnnnnnnnnnnnnnnnnnnnnnnnnnnnnnnnnnnnnnnnnnnnnnnnnnnnnnnnnnnnnnnnnnnnnnnnnnnnnnnnnnnnnnnnnnnnnnnnnnnnnnnnnnnnnnnnnnnnnnnnnnnnnnnnnnnnnnnnnnnnnnnnnnnnnnnnnnnnnnnnnnnnnnnnnnnnnnnnnnnnnnnnnnnnnnnnnnnnnnnnnnnnnnnnnnnnnnnnnnnnnnnnnnnnnnnnnnnnnnnnnnnnnnnnnnnnnnnnnnnnnnnnnnnnnnnnnnnnnnnnnnnnnnnnnnnnnnnnnnnnnnnnnnnnnnnnnnnnnnnnnnnnnnnnnnnnnnnnnnnnnnnnnnnnnnnnnnnnnnnnnnnnnnnnnnnnnnnnnnnnnnnnnnnnnnnnnnnnnnnnnnnnnnnnnnnnnnnnnnnnnnnnnnnnnnnnnnnnnnnnnnnnnnnnnnnnnnnnnnnnnnnnnnnnnnnnnnnnnnnnnnnnnnnnnnnnnnnnnnnnnnnnnnnnnnnnnnnnnnnnnnnnnnnnnnnnnnnnnnnnnnnnnnnnnnnnnnnnnnnnnnnnnnnnnnnnnnnnnnnnnnnnnnnnnnnnnnnnnnnnnnnnnnnnnnnnnnnnnnnnnnnnnnnnnnnnnnnnnnnnnnnnnnnnnnnnnnnnnnnnnnnnnnnnnnnnnnnnnnnnnnnnnnnnnnnnnnnnnnnnnnnnnnnnnnnnnnnnnnnnnnnnnnnnnnnnnnnnnnnnnnnnnnnnnnnnnnnnnnnnnnnnnnnnnnnnnnnnnnnnnnnnnnnnnnnnnnnnnnnnnnnnnnnnnnnnnnnnnnnnnnnnnnnnnnnnnnnnnnnnnnnnnnnnnnnnnnnnnnnnnnnnnnnnnnnnnnnnnnnnnnnnnnnnnnnnnnnnnnnnnnnnnnnnnnnnnnnnnnnnnnnnnnnnnnnnnnnnnnnnnnnnnnnnnnnnnnnnnnnnnnnnnnnnnnnnnnnnnnnnnnnnnnnnnnnnnnnnnnnnnnnnnnnnnnnnnnnnnnnnnnnnnnnnnnnnnnnnnnnnnnnnnnnnnnnnnnnnnnnnnnnnnnnnnnnnnnnnnnnnnnnnnnnnnnnnnnnnnnnnnnnnnnnnnnnnnnnnnnnnnnnnnnnnnnnnnnnnnnnnnnnnnnnnnnnnnnnnnnnnnnnnnnnnnnnnnnnnnnnnnnnnnnnnnnnnnnnnnnnnnnnnnnnnnnnnnnnnnnnnnnnnnnnnnnnnnnnnnnnnnnnnnnnnnnnnnnnnnnnnnnnnnnnnnnnnnnnnnnnnnnnnnnnnnnnnnnnnnnnnnnnnnnnnnnnnnnnnnnnnnnnnnnnnnnnnnnnnnnnnnnnnnnnnnnnnnnnnnnnnnnnnnnnnnnnnnnnnnnnnnnnnnnnnnnnnnnnnnnnnnnnnnnnnnnnnnnnnnnnnnnnnnnnnnnnnnnnnnnnnnnnnnnnnnnnnnnnnnnnnnnnnnnnnnnnnnnnnnnnnnnnnnnnnnnnnnnnnnnnnnnnnnnnnnnnnnnnnnnnnnnnnnnnnnnnnnnnnnnnnnnnnnnnnnnnnnnnnnnnnnnnnnnnnnnnnnnnnnnnnnnnnnnnnnnnnnnnnnnnnnnnnnnnnnnnnnnnnnnnnnnnnnnnnnnnnnnnnnnnnnnnnnnnnnnnnnnnnnnnnnnnnnnnnnnnnnnnnnnnnnnnnnnnnnnnnnnnnnnnnnnnnnnnnnnnnnnnnnnnnnnnnnnnnnnnnnnnnnnnnnnnnnnnnnnnnnnnnnnnnnnnnnnnnnnnnnnnnnnnnnnnnnnnnnnnnnnnnnnnnnnnnnnnnnnnnnnnnnnnnnnnnnnnnnnnnnnnnnnnnnnnnnnnnnnnnnnnnnnnnnnnnnnnnnnnnnnnnnnnnnnnnnnnnnnnnnnnnnnnnnnnnnnnnnnnnnnnnnnnnnnnnnnnnnnnnnnnnnnnnnnnnnnnnnnnnnnnnnnnnnnnnnnnnnnnnnnnnnnnnnnnnnnnnnnnnnnnnnnnnnnnnnnnnnnnnnnnnnnnnnnnnnnnnnnnnnnnnnnnnnnnnnnnnnnnnnnnnnnnnnnnnnnnnnnnnnnnnnnnnnnnnnnnnnnnnnnnnnnnnnnnnnnnnnnnnnnnnnnnnnnnnnnnnnnnnnnnnnnnnnnnnnnnnnnnnnnnnnnnnnnnnnnnnnnnnnnnnnnnnnnnnnnnnnnnnnnnnnnnnnnnnnnnnnnnnnnnnnnnnnnnnnnnnnnnnnnnnnnnnnnnnnnnnnnnnnnnnnnnnnnnnnnnnnnnnnnnnnnnnnnnnnnnnnnnnnnnnnnnnnnnnnnnnnnnnnnnnnnnnnnnnnnnnnnnnnnnnnnnnnnnnnnnnnnnnnnnnnnnnnnnnnnnnnnnnnnnnnnnnnnnnnnnnnnnnnnnnnnnnnnnnnnnnnnnnnnnnnnnnnnnnnnnnnnnnnnnnnnnnnnnnnnnnnnnnnnnnnnnnnnnnnnnnnnnnnnnnnnnnnnnnnnnnnnnnnnnnnnnnnnnnnnnnnnnnnnnnnnnnnnnnnnnnnnnnnnnnnnnnnnnnnnnnnnnnnnnnnnnnnnnnnnnnnnnnnnnnnnnnnnnnnnnnnnnnnnnnnnnnnnnnnnnnnnnnnnnnnnnnnnnnnnnnnnnnnnnnnnnnnnnnnnnnnnnnnnnnnnnnnnnnnnnnnnnnnnnnnnnnnnnnnnnnnnnnnnnnnnnnnnnnnnnnnnnnnnnnnnnnnnnnnnnnnnnnnnnnnnnnnnnnnnnnnnnnnnnnnnnnnnnnnnnnnnnnnnnnnnnnnnnnnnnnnnnnnnnnnnnnnnnnnnnnnnnnnnnnnnnnnnnnnnnnnnnnnnnnnnnnnnnnnnnnnnnnnnnnnnnnnnnnnnnnnnnnnnnnnnnnnnnnnnnnnnnnnnnnnnnnnnnnnnnnnnnnnnnnnnnnnnnnnnnnnnnnnnnnnnnnnnnnnnnnnnnnnnnnnnnnnnnnnnnnnnnnnnnnnnnnnnnnnnnnnnnnnnnnnnnnnnnnnnnnnnnnnnnnnnnnnnnnnnnnnnnnnnnnnnnnnnnnnnnnnnnnnnnnnnnnnnnnnnnnnnnnnnnnnnnnnnnnnnnnnnnnnnnnnnnnnnnnnnnnnnnnnnnnnnnnnnnnnnnnnnnnnnnnnnnnnnnnnnnnnnnnnnnnnnnnnnnnnnnnnnnnnnnnnnnnnnnnnnnnnnnnnnnnnnnnnnnnnnnnnnnnnnnnnnnnnnnnnnnnnnnnnnnnnnnnnnnnnnnnnnnnnnnnnnnnnnnnnnnnnnnnnnnnnnnnnnnnnnnnnnnnnnnnnnnnnnnnnnnnnnnnnnnnnnnnnnnnnnnnnnnnnnnnnnnnnnnnnnnnnnnnnnnnnnnnnnnnnnnnnnnnnnnnnnnnnnnnnnnnnnnnnnnnnnnnnnnnnnnnnnnnnnnnnnnnnnnnnnnnnnnnnnnnnnnnnnnnnnnnnnnnnnnnnnnnnnnnnnnnnnnnnnnnnnnnnnnnnnnnnnnnnnnnnnnnnnnnnnnnnnnnnnnnnnnnnnnnnnnnnnnnnnnnnnnnnnnnnnnnnnnnnnnnnnnnnnnnnnnnnnnnnnnnnnnnnnnnnnnnnnnnnnnnnnnnnnnnnnnnnnnnnnnnnnnnnnnnnnnnnnnnnnnnnnnnnnnnnnnnnnnnnnnnnnnnnnnnnnnnnnnnnnnnnnnnnnnnnnnnnnnnnnnnnnnnnnnnnnnnnnnnnnnnnnnnnnnnnnnnnnnnnnnnnnnnnnnnnnnnnnnnnnnnnnnnnnnnnnnnnnnnnnnnnnnnnnnnnnnnnnnnnnnnnnnnnnnnnnnnnnnnnnnnnnnnnnnnnnnnnnnnnnnnnnnnnnnnnnnnnnnnnnnnnnnnnnnnnnnnnnnnnnnnnnnnnnnnnnnnnnnnnnnnnnnnnnnnnnnnnnnnnnnnnnnnnnnnnnnnnnnnnnnnnnnnnnnnnnnnnnnnnnnnnnnnnnnnnnnnnnnnnnnnnnnnnnnnnnnnnnnnnnnnnnnnnnnnnnnnnnnnnnnnnnnnnnnnnnnnnnnnnnnnnnnnnnnnnnnnnnnnnnnnnnnnnnnnnnnnnnnnnnnnnnnnnnnnnnnnnnnnnnnnnnnnnnnnnnnnnnnnnnnnnnnnnnnnnnnnnnnnnnnnnnnnnnnnnnnnnnnnnnnnnnnnnnnnnnnnnnnnnnnnnnnnnnnnnnnnnnnnnnnnnnnnnnnnnnnnnnnnnnnnnnnnnnnnnnnnnnnnnnnnnnnnnnnnnnnnnnnnnnnnnnnnnnnnnnnnnnnnnnnnnnnnnnnnnnnnnnnnnnnnnnnnnnnnnnnnnnnnnnnnnnnnnnnnnnnnnnnnnnnnnnnnnnnnnnnnnnnnnnnnnnnnnnnnnnnnnnnnnnnnnnnnnnnnnnnnnnnnnnnnnnnnnnnnnnnnnnnnnnnnnnnnnnnnnnnnnnnnnnnnnnnnnnnnnnnnnnnnnnnnnnnnnnnnnnnnnnnnnnnnnnnnnnnnnnnnnnnnnnnnnnnnnnnnnnnnnnnnnnnnnnnnnnnnnnnnnnnnnnnnnnnnnnnnnnnnnnnnnnnnnnnnnnnnnnnnnnnnnnnnnnnnnnnnnnnnnnnnnnnnnnnnnnnnnnnnnnnnnnnnnnnnnnnnnnnnnnnnnnnnnnnnnnnnnnnnnnnnnnnnnnnnnnnnnnnnnnnnnnnnnnnnnnnnnnnnnnnnnnnnnnnnnnnnnnnnnnnnnnnnnnnnnnnnnnnnnnnnnnnnnnnnnnnnnnnnnnnnnnnnnnnnnnnnnnnnnnnnnnnnnnnnnnnnnnnnnnnnnnnnnnnnnnnnnnnnnnnnnnnnnnnnnnnnnnnnnnnnnnnnnnnnnnnnnnnnnnnnnnnnnnnnnnnnnnnnnnnnnnnnnnnnnnnnnnnnnnnnnnnnnnnnnnnnnnnnnnnnnnnnnnnnnnnnnnnnnnnnnnnnnnnnnnnnnnnnnnnnnnnnnnnnnnnnnnnnnnnnnnnnnnnnnnnnnnnnnnnnnnnnnnnnnnnnnnnnnnnnnnnnnnnnnnnnnnnnnnnnnnnnnnnnnnnnnnnnnnnnnnnnnnnnnnnnnnnnnnnnnnnnnnnnnnnnnnnnnnnnnnnnnnnnnnnnnnnnnnnnnnnnnnnnnnnnnnnnnnnnnnnnnnnnnnnnnnnnnnnnnnnnnnnnnnnnnnnnnnnnnnnnnnnnnnnnnnnnnnnnnnnnnnnnnnnnnnnnnnnnnnnnnnnnnnnnnnnnnnnnnnnnnnnnnnnnnnnnnnnnnnnnnnnnnnnnnnnnnnnnnnnnnnnnnnnnnnnnnnnnnnnnnnnnnnnnnnnnnnnnnnnnnnnnnnnnnnnnnnnnnnnnnnnnnnnnnnnnnnnnnnnnnnnnnnnnnnnnnnnnnnnnnnnnnnnnnnnnnnnnnnnnnnnnnnnnnnnnnnnnnnnnnnnnnnnnnnnnnnnnnnnnnnnnnnnnnnnnnnnnnnnnnnnnnnnnnnnnnnnnnnnnnnnnnnnnnnnnnnnnnnnnnnnnnnnnnnnnnnnnnnnnnnnnnnnnnnnnnnnnnnnnnnnnnnnnnnnnnnnnnnnnnnnnnnnnnnnnnnnnnnnnnnnnnnnnnnnnnnnnnnnnnnnnnnnnnnnnnnnnnnnnnnnnnnnnnnnnnnnnnnnnnnnnnnnnnnnnnnnnnnnnnnnnnnnnnnnnnnnnnnnnnnnnnnnnnnnnnnnnnnnnnnnnnnnnnnnnnnnnnnnnnnnnnnnnnnnnnnnnnnnnnnnnnnnnnnnnnnnnnnnnnnnnnnnnnnnnnnnnnnnnnnnnnnnnnnnnnnnnnnnnnnnnnnnnnnnnnnnnnnnnnnnnnnnnnnnnnnnnnnnnnnnnnnnnnnnnnnnnnnnnnnnnnnnnnnnnnnnnnnnnnnnnnnnnnnnnnnnnnnnnnnnnnnnnnnnnnnnnnnnnnnnnnnnnnnnnnnnnnnnnnnnnnnnnnnnnnnnnnnnnnnnnnnnnnnnnnnnnnnnnnnnnnnnnnnnnnnnnnnnnnnnnnnnnnnnnnnnnnnnnnnnnnnnnnnnnnnnnnnnnnnnnnnnnnnnnnnnnnnnnnnnnnnnnnnnnnnnnnnnnnnnnnnnnnnnnnnnnnnnnnnnnnnnnnnnnnnnnnnnnnnnnnnnnnnnnnnnnnnnnnnnnnnnnnnnnnnnnnnnnnnnnnnnnnnnnnnnnnnnnnnnnnnnnnnnnnnnnnnnnnnnnnnnnnnnnnnnnnnnnnnnnnnnnnnnnnnnnnnnnnnnnnnnnnnnnnnnnnnnnnnnnnnnnnnnnnnnnnnnnnnnnnnnnnnnnnnnnnnnnnnnnnnnnnnnnnnnnnnnnnnnnnnnnnnnnnnnnnnnnnnnnnnnnnnnnnnnnnnnnnnnnnnnnnnnnnnnnnnnnnnnnnnnnnnnnnnnnnnnnnnnnnnnnnnnnnnnnnnnnnnnnnnnnnnnnnnnnnnnnnnnnnnnnnnnnnnnnnnnnnnnnnnnnnnnnnnnnnnnnnnnnnnnnnnnnnnnnnnnnnnnnnnnnnnnnnnnnnnnnnnnnnnnnnnnnnnnnnnnnnnnnnnnnnnnnnnnnnnnnnnnnnnnnnnnnnnnnnnnnnnnnnnnnnnnnnnnnnnnnnnnnnnnnnnnnnnnnnnnnnnnnnnnnnnnnnnnnnnnnnnnnnnnnnnnnnnnnnnnnnnnnnnnnnnnnnnnnnnnnnnnnnnnnnnnnnnnnnnnnnnnnnnnnnnnnnnnnnnnnnnnnnnnnnnnnnnnnnnnnnnnnnnnnnnnnnnnnnnnnnnnnnnnnnnnnnnnnnnnnnnnnnnnnnnnnnnnnnnnnnnnnnnnnnnnnnnnnnnnnnnnnnnnnnnnnnnnnnnnnnnnnnnnnnnnnnnnnnnnnnnnnnnnnnnnnnnnnnnnnnnnnnnnnnnnnnnnnnnnnnnnnnnnnnnnnnnnnnnnnnnnnnnnnnnnnnnnnnnnnnnnnnnnnnnnnnnnnnnnnnnnnnnnnnnnnnnnnnnnnnnnnnnnnnnnnnnnnnnnnnnnnnnnnnnnnnnnnnnnnnnnnnnnnnnnnnnnnnnnnnnnnnnnnnnnnnnnnnnnnnnnnnnnnnnnnnnnnnnnnnnnnnnnnnnnnnnnnnnnnnnnnnnnnnnnnnnnnnnnnnnnnnnnnnnnnnnnnnnnnnnnnnnnnnnnnnnnnnnnnnnnnnnnnnnnnnnnnnnnnnnnnnnnnnnnnnnnnnnnnnnnnnnnnnnnnnnnnnnnnnnnnnnnnnnnnnnnnnnnnnnnnnnnnnnnnnnnnnnnnnnnnnnnnnnnnnnnnnnnnnnnnnnnnnnnnnnnnnnnnnnnnnnnnnnnnnnnnnnnnnnnnnnnnnnnnnnnnnnnnnnnnnnnnnnnnnnnnnnnnnnnnnnnnnnnnnnnnnnnnnnnnnnnnnnnnnnnnnnnnnnnnnnnnnnnnnnnnnnnnnnnnnnnnnnnnnnnnnnnnnnnnnnnnnnnnnnnnnnnnnnnnnnnnnnnnnnnnnnnnnnnnnnnnnnnnnnnnnnnnnnnnnnnnnnnnnnnnnnnnnnnnnnnnnnnnnnnnnnnnnnnnnnnnnnnnnnnnnnnnnnnnnnnnnnnnnnnnnnnnnnnnnnnnnnnnnnnnnnnnnnnnnnnnnnnnnnnnnnnnnnnnnnnnnnnnnnnnnnnnnnnnnnnnnnnnnnnnnnnnnnnnnnnnnnnnnnnnnnnnnnnnnnnnnnnnnnnnnnnnnnnnnnnnnnnnnnnnnnnnnnnnnnnnnnnnnnnnnnnnnnnnnnnnnnnnnnnnnnnnnnnnnnnnnnnnnnnnnnnnnnnnnnnnnnnnnnnnnnnnnnnnnnnnnnnnnnnnnnnnnnnnnnnnnnnnnnnnnnnnnnnnnnnnnnnnnnnnnnnnnnnnnnnnnnnnnnnnnnnnnnnnnnnnnnnnnnnnnnnnnnnnnnnnnnnnnnnnnnnnnnnnnnnnnnnnnnnnnnnnnnnnnnnnnnnnnnnnnnnnnnnnnnnnnnnnnnnnnnnnnnnnnnnnnnnnnnnnnnnnnnnnnnnnnnnnnnnnnnnnnnnnnnnnnnnnnnnnnnnnnnnnnnnnnnnnnnnnnnnnnnnnnnnnnnnnnnnnnnnnnnnnnnnnnnnnnnnnnnnnnnnnnnnnnnnnnnnnnnnnnnnnnnnnnnnnnnnnnnnnnnnnnnnnnnnnnnnnnnnnnnnnnnnnnnnnnnnnnnnnnnnnnnnnnnnnnnnnnnnnnnnnnnnnnnnnnnnnnnnnnnnnnnnnnnnnnnnnnnnnnnnnnnnnnnnnnnnnnnnnnnnnnnnnnnnnnnnnnnnnnnnnnnnnnnnnnnnnnnnnnnnnnnnnnnnnnnnnnnnnnnnnnnnnnnnnnnnnnnnnnnnnnnnnnnnnnnnnnnnnnnnnnnnnnnnnnnnnnnnnnnnnnnnnnnnnnnnnnnnnnnnnnnnnnnnnnnnnnnnnnnnnnnnnnnnnnnnnnnnnnnnnnnnnnnnnnnnnnnnnnnnnnnnnnnnnnnnnnnnnnnnnnnnnnnnnnnnnnnnnnnnnnnnnnnnnnnnnnnnnnnnnnnnnnnnnnnnnnnnnnnnnnnnnnnnnnnnnnnnnnnnnnnnnnnnnnnnnnnnnnnnnnnnnnnnnnnnnnnnnnnnnnnnnnnnnnnnnnnnnnnnnnnnnnnnnnnnnnnnnnnnnnnnnnnnnnnnnnnnnnnnnnnnnnnnnnnnnnnnnnnnnnnnnnnnnnnnnnnnnnnnnnnnnnnnnnnnnnnnnnnnnnnnnnnnnnnnnnnnnnnnnnnnnnnnnnnnnnnnnnnnnnnnnnnnnnnnnnnnnnnnnnnnnnnnnnnnnnnnnnnnnnnnnnnnnnnnnnnnnnnnnnnnnnnnnnnnnnnnnnnnnnnnnnnnnnnnnnnnnnnnnnnnnnnnnnnnnnnnnnnnnnnnnnnnnnnnnnnnnnnnnnnnnnnnnnnnnnnnnnnnnnnnnnnnnnnnnnnnnnnnnnnnnnnnnnnnnnnnnnnnnnnnnnnnnnnnnnnnnnnnnnnnnnnnnnnnnnnnnnnnnnnnnnnnnnnnnnnnnnnnnnnnnnnnnnnnnnnnnnnnnnnnnnnnnnnnnnnnnnnnnnnnnnnnnnnnnnnnnnnnnnnnnnnnnnnnnnnnnnnnnnnnnnnnnnnnnnnnnnnnnnnnnnnnnnnnnnnnnnnnnnnnnnnnnnnnnnnnnnnnnnnnnnnnnnnnnnnnnnnnnnnnnnnnnnnnnnnnnnnnnnnnnnnnnnnnnnnnnnnnnnnnnnnnnnnnnnnnnnnnnnnnnnnnnnnnnnnnnnnnnnnnnnnnnnnnnnnnnnnnnnnnnnnnnnnnnnnnnnnnnnnnnnnnnnnnnnnnnnnnnnnnnnnnnnnnnnnnnnnnnnnnnnnnnnnnnnnnnnnnnnnnnnnnnnnnnnnnnnnnnnnnnnnnnnnnnnnnnnnnnnnnnnnnnnnnnnnnnnnnnnnnnnnnnnnnnnnnnnnnnnnnnnnnnnnnnnnnnnnnnnnnnnnnnnnnnnnnnnnnnnnnnnnnnnnnnnnnnnnnnnnnnnnnnnnnnnnnnnnnnnnnnnnnnnnnnnnnnnnnnnnnnnnnnnnnnnnnnnnnnnnnnnnnnnnnnnnnnnnnnnnnnnnnnnnnnnnnnnnnnnnnnnnnnnnnnnnnnnnnnnnnnnnnnnnnnnnnnnnnnnnnnnnnnnnnnnnnnnnnnnnnnnnnnnnnnnnnnnnnnnnnnnnnnnnnnnnnnnnnnnnnnnnnnnnnnnnnnnnnnnnnnnnnnnnnnnnnnnnnnnnnnnnnnnnnnnnnnnnnnnnnnnnnnnnnnnnnnnnnnnnnnnnnnnnnnnnnnnnnnnnnnnnnnnnnnnnnnnnnnnnnnnnnnnnnnnnnnnnnnnnnnnnnnnnnnnnnnnnnnnnnnnnnnnnnnnnnnnnnnnnnnnnnnnnnnnnnnnnnnnnnnnnnnnnnnnnnnnnnnnnnnnnnnnnnnnnnnnnnnnnnnnnnnnnnnnnnnnnnnnnnnnnnnnnnnnnnnnnnnnnnnnnnnnnnnnnnnnnnnnnnnnnnnnnnnnnnnnnnnnnnnnnnnnnnnnnnnnnnnnnnnnnnnnnnnnnnnnnnnnnnnnnnnnnnnnnnnnnnnnnnnnnnnnnnnnnnnnnnnnnnnnnnnnnnnnnnnnnnnnnnnnnnnnnnnnnnnnnnnnnnnnnnnnnnnnnnnnnnnnnnnnnnnnnnnnnnnnnnnnnnnnnnnnnnnnnnnnnnnnnnnnnnnnnnnnnnnnnnnnnnnnnnnnnnnnnnnnnnnnnnnnnnnnnnnnnnnnnnnnnnnnnnnnnnnnnnnnnnnnnnnnnnnnnnnnnnnnnnnnnnnnnnnnnnnnnnnnnnnnnnnnnnnnnnnnnnnnnnnnnnnnnnnnnnnnnnnnnnnnnnnnnnnnnnnnnnnnnnnnnnnnnnnnnnnnnnnnnnnnnnnnnnnnnnnnnnnnnnnnnnnnnnnnnnnnnnnnnnnnnnnnnnnnnnnnnnnnnnnnnnnnnnnnnnnnnnnnnnnnnnnnnnnnnnnnnnnnnnnnnnnnnnnnnnnnnnnnnnnnnnnnnnnnnnnnnnnnnnnnnnnnnnnnnnnnnnnnnnnnnnnnnnnnnnnnnnnnnnnnnnnnnnnnnnnnnnnnnnnnnnnnnnnnnnnnnnnnnnnnnnnnnnnnnnnnnnnnnnnnnnnnnnnnnnnnnnnnnnnnnnnnnnnnnnnnnnnnnnnnnnnnnnnnnnnnnnnnnnnnnnnnnnnnnnnnnnnnnnnnnnnnnnnnnnnnnnnnnnnnnnnnnnnnnnnnnnnnnnnnnnnnnnnnnnnnnnnnnnnnnnnnnnnnnnnnnnnnnnnnnnnnnnnnnnnnnnnnnnnnnnnnnnnnnnnnnnnnnnnnnnnnnnnnnnnnnnnnnnnnnnnnnnnnnnnnnnnnnnnnnnnnnnnnnnnnnnnnnnnnnnnnnnnnnnnnnnnnnnnnnnnnnnnnnnnnnnnnnnnnnnnnnnnnnnnnnnnnnnnnnnnnnnnnnnnnnnnnnnnnnnnnnnnnnnnnnnnnnnnnnnnnnnnnnnnnnnnnnnnnnnnnnnnnnnnnnnnnnnnnnnnnnnnnnnnnnnnnnnnnnnnnnnnnnnnnnnnnnnnnnnnnnnnnnnnnnnnnnnnnnnnnnnnnnnnnnnnnnnnnnnnnnnnnnnnnnnnnnnnnnnnnnnnnnnnnnnnnnnnnnnnnnnnnnnnnnnnnnnnnnnnnnnnnnnnnnnnnnnnnnnnnnnnnnnnnnnnnnnnnnnnnnnnnnnnnnnnnnnnnnnnnnnnnnnnnnnnnnnnnnnnnnnnnnnnnnnnnnnnnnnnnnnnnnnnnnnnnnnnnnnnnnnnnnnnnnnnnnnnnnnnnnnnnnnnnnnnnnnnnnnnnnnnnnnnnnnnnnnnnnnnnnnnnnnnnnnnnnnnnnnnnnnnnnnnnnnnnnnnnnnnnnnnnnnnnnnnnnnnnnnnnnnnnnnnnnnnnnnnnnnnnnnnnnnnnnnnnnnnnnnnnnnnnnnnnnnnnnnnnnnnnnnnnnnnnnnnnnnnnnnnnnnnnnnnnnnnnnnnnnnnnnnnnnnnnnnnnnnnnnnnnnnnnnnnnnnnnnnnnnnnnnnnnnnnnnnnnnnnnnnnnnnnnnnnnnnnnnnnnnnnnnnnnnnnnnnnnnnnnnnnnnnnnnnnnnnnnnnnnnnnnnnnnnnnnnnnnnnnnnnnnnnnnnnnnnnnnnnnnnnnnnnnnnnnnnnnnnnnnnnnnnnnnnnnnnnnnnnnnnnnnnnnnnnnnnnnnnnnnnnnnnnnnnnnnnnnnnnnnnnnnnnnnnnnnnnnnnnnnnnnnnnnnnnnnnnnnnnnnnnnnnnnnnnnnnnnnnnnnnnnnnnnnnnnnnnnnnnnnnnnnnnnnnnnnnnnnnnnnnnnnnnnnnnnnnnnnnnnnnnnnnnnnnnnnnnnnnnnnnnnnnnnnnnnnnnnnnnnnnnnnnnnnnnnnnnnnnnnnnnnnnnnnnnnnnnnnnnnnnnnnnnnnnnnnnnnnnnnnnnnnnnnnnnnnnnnnnnnnnnnnnnnnnnnnnnnnnnnnnnnnnnnnnnnnnnnnnnnnnnnnnnnnnnnnnnnnnnnnnnnnnnnnnnnnnnnnnnnnnnnnnnnnnnnnnnnnnnnnnnnnnnnnnnnnnnnnnnnnnnnnnnnnnnnnnnnnnnnnnnnnnnnnnnnnnnnnnnnnnnnnnnnnnnnnnnnnnnnnnnnnnnnnnnnnnnnnnnnnnnnnnnnnnnnnnnnnnnnnnnnnnnnnnnnnnnnnnnnnnnnnnnnnnnnnnnnnnnnnnnnnnnnnnnnnnnnnnnnnnnnnnnnnnnnnnnnnnnnnnnnnnnnnnnnnnnnnnnnnnnnnnnnnnnnnnnnnnnnnnnnnnnnnnnnnnnnnnnnnnnnnnnnnnnnnnnnnnnnnnnnnnnnnnnnnnnnnnnnnnnnnnnnnnnnnnnnnnnnnnnnnnnnnnnnnnnnnnnnnnnnnnnnnnnnnnnnnnnnnnnnnnnnnnnnnnnnnnnnnnnnnnnnnnnnnnnnnnnnnnnnnnnnnnnnnnnnnnnnnnnnnnnnnnnnnnnnnnnnnnnnnnnnnnnnnnnnnnnnnnnnnnnnnnnnnnnnnnnnnnnnnnnnnnnnnnnnnnnnnnnnnnnnnnnnnnnnnnnnnnnnnnnnnnnnnnnnnnnnnnnnnnnnnnnnnnnnnnnnnnnnnnnnnnnnnnnnnnnnnnnnnnnnnnnnnnnnnnnnnnnnnnnnnnnnnnnnnnnnnnnnnnnnnnnnnnnnnnnnnnnnnnnnnnnnnnnnnnnnnnnnnnnnnnnnnnnnnnnnnnnnnnnnnnnnnnnnnnnnnnnnnnnnnnnnnnnnnnnnnnnnnnnnnnnnnnnnnnnnnnnnnnnnnnnnnnnnnnnnnnnnnnnnnnnnnnnnnnnnnnnnnnnnnnnnnnnnnnnnnnnnnnnnnnnnnnnnnnnnnnnnnnnnnnnnnnnnnnnnnnnnnnnnnnnnnnnnnnnnnnnnnnnnnnnnnnnnnnnnnnnnnnnnnnnnnnnnnnnnnnnnnnnnnnnnnnnnnnnnnnnnnnnnnnnnnnnnnnnnnnnnnnnnnnnnnnnnnnnnnnnnnnnnnnnnnnnnnnnnnnnnnnnnnnnnnnnnnnnnnnnnnnnnnnnnnnnnnnnnnnnnnnnnnnnnnnnnnnnnnnnnnnnnnnnnnnnnnnnnnnnnnnnnnnnnnnnnnnnnnnnnnnnnnnnnnnnnnnnnnnnnnnnnnnnnnnnnnnnnnnnnnnnnnnnnnnnnnnnnnnnnnnnnnnnnnnnnnnnnnnnnnnnnnnnnnnnnnnnnnnnnnnnnnnnnnnnnnnnnnnnnnnnnnnnnnnnnnnnnnnnnnnnnnnnnnnnnnnnnnnnnnnnnnnnnnnnnnnnnnnnnnnnnnnnnnnnnnnnnnnnnnnnnnnnnnnnnnnnnnnnnnnnnnnnnnnnnnnnnnnnnnnnnnnnnnnnnnnnnnnnnnnnnnnnnnnnnnnnnnnnnnnnnnnnnnnnnnnnnnnnnnnnnnnnnnnnnnnnnnnnnnnnnnnnnnnnnnnnnnnnnnnnnnnnnnnnnnnnnnnnnnnnnnnnnnnnnnnnnnnnnnnnnnnnnnnnnnnnnnnnnnnnnnnnnnnnnnnnnnnnnnnnnnnnnnnnnnnnnnnnnnnnnnnnnnnnnnnnnnnnnnnnnnnnnnnnnnnnnnnnnnnnnnnnnnnnnnnnnnnnnnnnnnnnnnnnnnnnnnnnnnnnnnnnnnnnnnnnnnnnnnnnnnnnnnnnnnnnnnnnnnnnnnnnnnnnnnnnnnnnnnnnnnnnnnnnnnnnnnnnnnnnnnnnnnnnnnnnnnnnnnnnnnnnnnnnnnnnnnnnnnnnnnnnnnnnnnnnnnnnnnnnnnnnnnnnnnnnnnnnnnnnnnnnnnnnnnnnnnnnnnnnnnnnnnnnnnnnnnnnnnnnnnnnnnnnnnnnnnnnnnnnnnnnnnnnnnnnnnnnnnnnnnnnnnnnnnnnnnnnnnnnnnnnnnnnnnnnnnnnnnnnnnnnnnnnnnnnnnnnnnnnnnnnnnnnnnnnnnnnnnnnnnnnnnnnnnnnnnnnnnnnnnnnnnnnnnnnnnnnnnnnnnnnnnnnnnnnnnnnnnnnnnnnnnnnnnnnnnnnnnnnnnnnnnnnnnnnnnnnnnnnnnnnnnnnnnnnnnnnnnnnnnnnnnnnnnnnnnnnnnnnnnnnnnnnnnnnnnnnnnnnnnnnnnnnnnnnnnnnnnnnnnnnnnnnnnnnnnnnnnnnnnnnnnnnnnnnnnnnnnnnnnnnnnnnnnnnnnnnnnnnnnnnnnnnnnnnnnnnnnnnnnnnnnnnnnnnnnnnnnnnnnnnnnnnnnnnnnnnnnnnnnnnnnnnnnnnnnnnnnnnnnnnnnnnnnnnnnnnnnnnnnnnnnnnnnnnnnnnnnnnnnnnnnnnnnnnnnnnnnnnnnnnnnnnnnnnnnnnnnnnnnnnnnnnnnnnnnnnnnnnnnnnnnnnnnnnnnnnnnnnnnnnnnnnnnnnnnnnnnnnnnnnnnnnnnnnnnnnnnnnnnnnnnnnnnnnnnnnnnnnnnnnnnnnnnnnnnnnnnnnnnnnnnnnnnnnnnnnnnnnnnnnnnnnnnnnnnnnnnnnnnnnnnnnnnnnnnnnnnnnnnnnnnnnnnnnnnnnnnnnnnnnnnnnnnnnnnnnnnnnnnnnnnnnnnnnnnnnnnnnnnnnnnnnnnnnnnnnnnnnnnnnnnnnnnnnnnnnnnnnnnnnnnnnnnnnnnnnnnnnnnnnnnnnnnnnnnnnnnnnnnnnnnnnnnnnnnnnnnnnnnnnnnnnnnnnnnnnnnnnnnnnnnnnnnnnnnnnnnnnnnnnnnnnnnnnnnnnnnnnnnnnnnnnnnnnnnnnnnnnnnnnnnnnnnnnnnnnnnnnnnnnnnnnnnnnnnnnnnnnnnnnnnnnnnnnnnnnnnnnnnnnnnnnnnnnnnnnnnnnnnnnnnnnnnnnnnnnnnnnnnnnnnnnnnnnnnnnnnnnnnnnnnnnnnnnnnnnnnnnnnnnnnnnnnnnnnnnnnnnnnnnnnnnnnnnnnnnnnnnnnnnnnnnnnnnnnnnnnnnnnnnnnnnnnnnnnnnnnnnnnnnnnnnnnnnnnnnnnnnnnnnnnnnnnnnnnnnnnnnnnnnnnnnnnnnnnnnnnnnnnnnnnnnnnnnnnnnnnnnnnnnnnnnnnnnnnnnnnnnnnnnnnnnnnnnnnnnnnnnnnnnnnnnnnnnnnnnnnnnnnnnnnnnnnnnnnnnnnnnnnnnnnnnnnnnnnnnnnnnnnnnnnnnnnnnnnnnnnnnnnnnnnnnnnnnnnnnnnnnnnnnnnnnnnnnnnnnnnnnnnnnnnnnnnnnnnnnnnnnnnnnnnnnnnnnnnnnnnnnnnnnnnnnnnnnnnnnnnnnnnnnnnnnnnnnnnnnnnnnnnnnnnnnnnnnnnnnnnnnnnnnnnnnnnnnnnnnnnnnnnnnnnnnnnnnnnnnnnnnnnnnnnnnnnnnnnnnnnnnnnnnnnnnnnnnnnnnnnnnnnnnnnnnnnnnnnnnnnnnnnnnnnnnnnnnnnnnnnnnnnnnnnnnnnnnnnnnnnnnnnnnnnnnnnnnnnnnnnnnnnnnnnnnnnnnnnnnnnnnnnnnnnnnnnnnnnnnnnnnnnnnnnnnnnnnnnnnnnnnnnnnnnnnnnnnnnnnnnnnnnnnnnnnnnnnnnnnnnnnnnnnnnnnnnnnnnnnnnnnnnnnnnnnnnnnnnnnnnnnnnnnnnnnnnnnnnnnnnnnnnnnnnnnnnnnnnnnnnnnnnnnnnnnnnnnnnnnnnnnnnnnnnnnnnnnnnnnnnnnnnnnnnnnnnnnnnnnnnnnnnnnnnnnnnnnnnnnnnnnnnnnnnnnnnnnnnnnnnnnnnnnnnnnnnnnnnnnnnnnnnnnnnnnnnnnnnnnnnnnnnnnnnnnnnnnnnnnnnnnnnnnnnnnnnnnnnnnnnnnnnnnnnnnnnnnnnnnnnnnnnnnnnnnnnnnnnnnnnnnnnnnnnnnnnnnnnnnnnnnnnnnnnnnnnnnnnnnnnnnnnnnnnnnnnnnnnnnnnnnnnnnnnnnnnnnnnnnnnnnnnnnnnnnnnnnnnnnnnnnnnnnnnnnnnnnnnnnnnnnnnnnnnnnnnnnnnnnnnnnnnnnnnnnnnnnnnnnnnnnnnnnnnnnnnnnnnnnnnnnnnnnnnnnnnnnnnnnnnnnnnnnnnnnnnnnnnnnnnnnnnnnnnnnnnnnnnnnnnnnnnnnnnnnnnnnnnnnnnnnnnnnnnnnnnnnnnnnnnnnnnnnnnnnnnnnnnnnnnnnnnnnnnnnnnnnnnnnnnnnnnnnnnnnnnnnnnnnnnnnnnnnnnnnnnnnnnnnnnnnnnnnnnnnnnnnnnnnnnnnnnnnnnnnnnnnnnnnnnnnnnnnnnnnnnnnnnnnnnnnnnnnnnnnnnnnnnnnnnnnnnnnnnnnnnnnnnnnnnnnnnnnnnnnnnnnnnnnnnnnnnnnnnnnnnnnnnnnnnnnnnnnnnnnnnnnnnnnnnnnnnnnnnnnnnnnnnnnnnnnnnnnnnnnnnnnnnnnnnnnnnnnnnnnnnnnnnnnnnnnnnnnnnnnnnnnnnnnnnnnnnnnnnnnnnnnnnnnnnnnnnnnnnnnnnnnnnnnnnnnnnnnnnnnnnnnnnnnnnnnnnnnnnnnnnnnnnnnnnnnnnnnnnnnnnnnnnnnnnnnnnnnnnnnnnnnnnnnnnnnnnnnnnnnnnnnnnnnnnnnnnnnnnnnnnnnnnnnnnnnnnnnnnnnnnnnnnnnnnnnnnnnnnnnnnnnnnnnnnnnnnnnnnnnnnnnnnnnnnnnnnnnnnnnnnnnnnnnnnnnnnnnnnnnnnnnnnnnnnnnnnnnnnnnnnnnnnnnnnnnnnnnnnnnnnnnnnnnnnnnnnnnnnnnnnnnnnnnnnnnnnnnnnnnnnnnnnnnnnnnnnnnnnnnnnnnnnnnnnnnnnnnnnnnnnnnnnnnnnnnnnnnnnnnnnnnnnnnnnnnnnnnnnnnnnnnnnnnnnnnnnnnnnnnnnnnnnnnnnnnnnnnnnnnnnnnnnnnnnnnnnnnnnnnnnnnnnnnnnnnnnnnnnnnnnnnnnnnnnnnnnnnnnnnnnnnnnnnnnnnnnnnnnnnnnnnnnnnnnnnnnnnnnnnnnnnnnnnnnnnnnnnnnnnnnnnnnnnnnnnnnnnnnnnnnnnnnnnnnnnnnnnnnnnnnnnnnnnnnnnnnnnnnnnnnnnnnnnnnnnnnnnnnnnnnnnnnnnnnnnnnnnnnnnnnnnnnnnnnnnnnnnnnnnnnnnnnnnnnnnnnnnnnnnnnnnnnnnnnnnnnnnnnnnnnnnnnnnnnnnnnnnnnnnnnnnnnnnnnnnnnnnnnnnnnnnnnnnnnnnnnnnnnnnnnnnnnnnnnnnnnnnnnnnnnnnnnnnnnnnnnnnnnnnnnnnnnnnnnnnnnnnnnnnnnnnnnnnnnnnnnnnnnnnnnnnnnnnnnnnnnnnnnnnnnnnnnnnnnnnnnnnnnnnnnnnnnnnnnnnnnnnnnnnnnnnnnnnnnnnnnnnnnnnnnnnnnnnnnnnnnnnnnnnnnnnnnnnnnnnnnnnnnnnnnnnnnnnnnnnnnnnnnnnnnnnnnnnnnnnnnnnnnnnnnnnnnnnnnnnnnnnnnnnnnnnnnnnnnnnnnnnnnnnnnnnnnnnnnnnnnnnnnnnnnnnnnnnnnnnnnnnnnnnnnnnnnnnnnnnnnnnnnnnnnnnnnnnnnnnnnnnnnnnnnnnnnnnnnnnnnnnnnnnnnnnnnnnnnnnnnnnnnnnnnnnnnnnnnnnnnnnnnnnnnnnnnnnnnnnnnnnnnnnnnnnnnnnnnnnnnnnnnnnnnnnnnnnnnnnnnnnnnnnnnnnnnnnnnnnnnnnnnnnnnnnnnnnnnnnnnnnnnnnnnnnnnnnnnnnnnnnnnnnnnnnnnnnnnnnnnnnnnnnnnnnnnnnnnnnnnnnnnnnnnnnnnnnnnnnnnnnnnnnnnnnnnnnnnnnnnnnnnnnnnnnnnnnnnnnnnnnnnnnnnnnnnnnnnnnnnnnnnnnnnnnnnnnnnnnnnnnnnnnnnnnnnnnnnnnnnnnnnnnnnnnnnnnnnnnnnnnnnnnnnnnnnnnnnnnnnnnnnnnnnnnnnnnnnnnnnnnnnnnnnnnnnnnnnnnnnnnnnnnnnnnnnnnnnnnnnnnnnnnnnnnnnnnnnnnnnnnnnnnnnnnnnnnnnnnnnnnnnnnnnnnnnnnnnnnnnnnnnnnnnnnnnnnnnnnnnnnnnnnnnnnnnnnnnnnnnnnnnnnnnnnnnnnnnnnnnnnnnnnnnnnnnnnnnnnnnnnnnnnnnnnnnnnnnnnnnnnnnnnnnnnnnnnnnnnnnnnnnnnnnnnnnnnnnnnnnnnnnnnnnnnnnnnnnnnnnnnnnnnnnnnnnnnnnnnnnnnnnnnnnnnnnnnnnnnnnnnnnnnnnnnnnnnnnnnnnnnnnnnnnnnnnnnnnnnnnnnnnnnnnnnnnnnnnnnnnnnnnnnnnnnnnnnnnnnnnnnnnnnnnnnnnnnnnnnnnnnnnnnnnnnnnnnnnnnnnnnnnnnnnnnnnnnnnnnnnnnnnnnnnnnnnnnnnnnnnnnnnnnnnnnnnnnnnnnnnnnnnnnnnnnnnnnnnnnnnnnnnnnnnnnnnnnnnnnnnnnnnnnnnnnnnnnnnnnnnnnnnnnnnnnnnnnnnnnnnnnnnnnnnnnnnnnnnnnnnnnnnnnnnnnnnnnnnnnnnnnnnnnnnnnnnnnnnnnnnnnnnnnnnnnnnnnnnnnnnnnnnnnnnnnnnnnnnnnnnnnnnnnnnnnnnnnnnnnnnnnnnnnnnnnnnnnnnnnnnnnnnnnnnnnnnnnnnnnnnnnnnnnnnnnnnnnnnnnnnnnnnnnnnnnnnnnnnnnnnnnnnnnnnnnnnnnnnnnnnnnnnnnnnnnnnnnnnnnnnnnnnnnnnnnnnnnnnnnnnnnnnnnnnnnnnnnnnnnnnnnnnnnnnnnnnnnnnnnnnnnnnnnnnnnnnnnnnnnnnnnnnnnnnnnnnnnnnnnnnnnnnnnnnnnnnnnnnnnnnnnnnnnnnnnnnnnnnnnnnnnnnnnnnnnnnnnnnnnnnnnnnnnnnnnnnnnnnnnnnnnnnnnnnnnnnnnnnnnnnnnnnnnnnnnnnnnnnnnnnnnnnnnnnnnnnnnnnnnnnnnnnnnnnnnnnnnnnnnnnnnnnnnnnnnnnnnnnnnnnnnnnnnnnnnnnnnnnnnnnnnnnnnnnnnnnnnnnnnnnnnnnnnnnnnnnnnnnnnnnnnnnnnnnnnnnnnnnnnnnnnnnnnnnnnnnnnnnnnnnnnnnnnnnnnnnnnnnnnnnnnnnnnnnnnnnnnnnnnnnnnnnnnnnnnnnnnnnnnnnnnnnnnnnnnnnnnnnnnnnnnnnnnnnnnnnnnnnnnnnnnnnnnnnnnnnnnnnnnnnnnnnnnnnnnnnnnnnnnnnnnnnnnnnnnnnnnnnnnnnnnnnnnnnnnnnnnnnnnnnnnnnnnnnnnnnnnnnnnnnnnnnnnnnnnnnnnnnnnnnnnnnnnnnnnnnnnnnnnnnnnnnnnnnnnnnnnnnnnnnnnnnnnnnnnnnnnnnnnnnnnnnnnnnnnnnnnnnnnnnnnnnnnnnnnnnnnnnnnnnnnnnnnnnnnnnnnnnnnnnnnnnnnnnnnnnnnnnnnnnnnnnnnnnnnnnnnnnnnnnnnnnnnnnnnnnnnnnnnnnnnnnnnnnnnnnnnnnnnnnnnnnnnnnnnnnnnnnnnnnnnnnnnnnnnnnnnnnnnnnnnnnnnnnnnnnnnnnnnnnnnnnnnnnnnnnnnnnnnnnnnnnnnnnnnnnnnnnnnnnnnnnnnnnnnnnnnnnnnnnnnnnnnnnnnnnnnnnnnnnnnnnnnnnnnnnnnnnnnnnnnnnnnnnnnnnnnnnnnnnnnnnnnnnnnnnnnnnnnnnnnnnnnnnnnnnnnnnnnnnnnnnnnnnnnnnnnnnnnnnnnnnnnnnnnnnnnnnnnnnnnnnnnnnnnnnnnnnnnnnnnnnnnnnnnnnnnnnnnnnnnnnnnnnnnnnnnnnnnnnnnnnnnnnnnnnnnnnnnnnnnnnnnnnnnnnnnnnnnnnnnnnnnnnnnnnnnnnnnnnnnnnnnnnnnnnnnnnnnnnnnnnnnnnnnnnnnnnnnnnnnnnnnnnnnnnnnnnnnnnnnnnnnnnnnnnnnnnnnnnnnnnnnnnnnnnnnnnnnnnnnnnnnnnnnnnnnnnnnnnnnnnnnnnnnnnnnnnnnnnnnnnnnnnnnnnnnnnnnnnnnnnnnnnnnnnnnnnnnnnnnnnnnnnnnnnnnnnnnnnnnnnnnnnnnnnnnnnnnnnnnnnnnnnnnnnnnnnnnnnnnnnnnnnnnnnnnnnnnnnnnnnnnnnnnnnnnnnnnnnnnnnnnnnnnnnnnnnnnnnnnnnnnnnnnnnnnnnnnnnnnnnnnnnnnnnnnnnnnnnnnnnnnnnnnnnnnnnnnnnnnnnnnnnnnnnnnnnnnnnnnnnnnnnnnnnnnnnnnnnnnnnnnnnnnnnnnnnnnnnnnnnnnnnnnnnnnnnnnnnnnnnnnnnnnnnnnnnnnnnnnnnnnnnnnnnnnnnnnnnnnnnnnnnnnnnnnnnnnnnnnnnnnnnnnnnnnnnnnnnnnnnnnnnnnnnnnnnnnnnnnnnnnnnnnnnnnnnnnnnnnnnnnnnnnnnnnnnnnnnnnnnnnnnnnnnnnnnnnnnnnnnnnnnnnnnnnnnnnnnnnnnnnnnnnnnnnnnnnnnnnnnnnnnnnnnnnnnnnnnnnnnnnnnnnnnnnnnnnnnnnnnnnnnnnnnnnnnnnnnnnnnnnnnnnnnnnnnnnnnnnnnnnnnnnnnnnnnnnnnnnnnnnnnnnnnnnnnnnnnnnnnnnnnnnnnnnnnnnnnnnnnnnnnnnnnnnnnnnnnnnnnnnnnnnnnnnnnnnnnnnnnnnnnnnnnnnnnnnnnnnnnnnnnnnnnnnnnnnnnnnnnnnnnnnnnnnnnnnnnnnnnnnnnnnnnnnnnnnnnnnnnnnnnnnnnnnnnnnnnnnnnnnnnnnnnnnnnnnnnnnnnnnnnnnnnnnnnnnnnnnnnnnnnnnnnnnnnnnnnnnnnnnnnnnnnnnnnnnnnnnnnnnnnnnnnnnnnnnnnnnnnnnnnnnnnnnnnnnnnnnnnnnnnnnnnnnnnnnnnnnnnnnnnnnnnnnnnnnnnnnnnnnnnnnnnnnnnnnnnnnnnnnnnnnnnnnnnnnnnnnnnnnnnnnnnnnnnnnnnnnnnnnnnnnnnnnnnnnnnnnnnnnnnnnnnnnnnnnnnnnnnnnnnnnnnnnnnnnnnnnnnnnnnnnnnnnnnnnnnnnnnnnnnnnnnnnnnnnnnnnnnnnnnnnnnnnnnnnnnnnnnnnnnnnnnnnnnnnnnnnnnnnnnnnnnnnnnnnnnnnnnnnnnnnnnnnnnnnnnnnnnnnnnnnnnnnnnnnnnnnnnnnnnnnnnnnnnnnnnnnnnnnnnnnnnnnnnnnnnnnnnnnnnnnnnnnnnnnnnnnnnnnnnnnnnnnnnnnnnnnnnnnnnnnnnnnnnnnnnnnnnnnnnnnnnnnnnnnnnnnnnnnnnnnnnnnnnnnnnnnnnnnnnnnnnnnnnnnnnnnnnnnnnnnnnnnnnnnnnnnnnnnnnnnnnnnnnnnnnnnnnnnnnnnnnnnnnnnnnnnnnnnnnnnnnnnnnnnnnnnnnnnnnnnnnnnnnnnnnnnnnnnnnnnnnnnnnnnnnnnnnnnnnnnnnnnnnnnnnnnnnnnnnnnnnnnnnnnnnnnnnnnnnnnnnnnnnnnnnnnnnnnnnnnnnnnnnnnnnnnnnnnnnnnnnnnnnnnnnnnnnnnnnnnnnnnnnnnnnnnnnnnnnnnnnnnnnnnnnnnnnnnnnnnnnnnnnnnnnnnnnnnnnnnnnnnnnnnnnnnnnnnnnnnnnnnnnnnnnnnnnnnnnnnnnnnnnnnnnnnnnnnnnnnnnnnnnnnnnnnnnnnnnnnnnnnnnnnnnnnnnnnnnnnnnnnnnnnnnnnnnnnnnnnnnnnnnnnnnnnnnnnnnnnnnnnnnnnnnnnnnnnnnnnnnnnnnnnnnnnnnnnnnnnnnnnnnnnnnnnnnnnnnnnnnnnnnnnnnnnnnnnnnnnnnnnnnnnnnnnnnnnnnnnnnnnnnnnnnnnnnnnnnnnnnnnnnnnnnnnnnnnnnnnnnnnnnnnnnnnnnnnnnnnnnnnnnnnnnnnnnnnnnnnnnnnnnnnnnnnnnnnnnnnnnnnnnnnnnnnnnnnnnnnnnnnnnnnnnnnnnnnnnnnnnnnnnnnnnnnnnnnnnnnnnnnnnnnnnnnnnnnnnnnnnnnnnnnnnnnnnnnnnnnnnnnnnnnnnnnnnnnnnnnnnnnnnnnnnnnnnnnnnnnnnnnnnnnnnnnnnnnnnnnnnnnnnnnnnnnnnnnnnnnnnnnnnnnnnnnnnnnnnnnnnnnnnnnnnnnnnnnnnnnnnnnnnnnnnnnnnnnnnnnnnnnnnnnnnnnnnnnnnnnnnnnnnnnnnnnnnnnnnnnnnnnnnnnnnnnnnnnnnnnnnnnnnnnnnnnnnnnnnnnnnnnnnnnnnnnnnnnnnnnnnnnnnnnnnnnnnnnnnnnnnnnnnnnnnnnnnnnnnnnnnnnnnnnnnnnnnnnnnnnnnnnnnnnnnnnnnnnnnnnnnnnnnnnnnnnnnnnnnnnnnnnnnnnnnnnnnnnnnnnnnnnnnnnnnnnnnnnnnnnnnnnnnnnnnnnnnnnnnnnnnnnnnnnnnnnnnnnnnnnnnnnnnnnnnnnnnnnnnnnnnnnnnnnnnnnnnnnnnnnnnnnnnnnnnnnnnnnnnnnnnnnnnnnnnnnnnnnnnnnnnnnnnnnnnnnnnnnnnnnnnnnnnnnnnnnnnnnnnnnnnnnnnnnnnnnnnnnnnnnnnnnnnnnnnnnnnnnnnnnnnnnnnnnnnnnnnnnnnnnnnnnnnnnnnnnnnnnnnnnnnnnnnnnnnnnnnnnnnnnnnnnnnnnnnnnnnnnnnnnnnnnnnnnnnnnnnnnnnnnnnnnnnnnnnnnnnnnnnnnnnnnnnnnnnnnnnnnnnnnnnnnnnnnnnnnnnnnnnnnnnnnnnnnnnnnnnnnnnnnnnnnnnnnnnnnnnnnnnnnnnnnnnnnnnnnnnnnnnnnnnnnnnnnnnnnnnnnnnnnnnnnnnnnnnnnnnnnnnnnnnnnnnnnnnnnnnnnnnnnnnnnnnnnnnnnnnnnnnnnnnnnnnnnnnnnnnnnnnnnnnnnnnnnnnnnnnnnnnnnnnnnnnnnnnnnnnnnnnnnnnnnnnnnnnnnnnnnnnnnnnnnnnnnnnnnnnnnnnnnnnnnnnnnnnnnnnnnnnnnnnnnnnnnnnnnnnnnnnnnnnnnnnnnnnnnnnnnnnnnnnnnnnnnnnnnnnnnnnnnnnnnnnnnnnnnnnnnnnnnnnnnnnnnnnnnnnnnnnnnnnnnnnnnnnnnnnnnnnnnnnnnnnnnnnnnnnnnnnnnnnnnnnnnnnnnnnnnnnnnnnnnnnnnnnnnnnnnnnnnnnnnnnnnnnnnnnnnnnnnnnnnnnnnnnnnnnnnnnnnnnnnnnnnnnnnnnnnnnnnnnnnnnnnnnnnnnnnnnnnnnnnnnnnnnnnnnnnnnnnnnnnnnnnnnnnnnnnnnnnnnnnnnnnnnnnnnnnnnnnnnnnnnnnnnnnnnnnnnnnnnnnnnnnnnnnnnnnnnnnnnnnnnnnnnnnnnnnnnnnnnnnnnnnnnnnnnnnnnnnnnnnnnnnnnnnnnnnnnnnnnnnnnnnnnnnnnnnnnnnnnnnnnnnnnnnnnnnnnnnnnnnnnnnnnnnnnnnnnnnnnnnnnnnnnnnnnnnnnnnnnnnnnnnnnnnnnnnnnnnnnnnnnnnnnnnnnnnnnnnnnnnnnnnnnnnnnnnnnnnnnnnnnnnnnnnnnnnnnnnnnnnnnnnnnnnnnnnnnnnnnnnnnnnnnnnnnnnnnnnnnnnnnnnnnnnnnnnnnnnnnnnnnnnnnnnnnnnnnnnnnnnnnnnnnnnnnnnnnnnnnnnnnnnnnnnnnnnnnnnnnnnnnnnnnnnnnnnnnnnnnnnnnnnnnnnnnnnnnnnnnnnnnnnnnnnnnnnnnnnnnnnnnnnnnnnnnnnnnnnnnnnnnnnnnnnnnnnnnnnnnnnnnnnnnnnnnnnnnnnnnnnnnnnnnnnnnnnnnnnnnnnnnnnnnnnnnnnnnnnnnnnnnnnnnnnnnnnnnnnnnnnnnnnnnnnnnnnnnnnnnnnnnnnnnnnnnnnnnnnnnnnnnnnnnnnnnnnnnnnnnnnnnnnnnnnnnnnnnnnnnnnnnnnnnnnnnnnnnnnnnnnnnnnnnnnnnnnnnnnnnnnnnnnnnnnnnnnnnnnnnnnnnnnnnnnnnnnnnnnnnnnnnnnnnnnnnnnnnnnnnnnnnnnnnnnnnnnnnnnnnnnnnnnnnnnnnnnnnnnnnnnnnnnnnnnnnnnnnnnnnnnnnnnnnnnnnnnnnnnnnnnnnnnnnnnnnnnnnnnnnnnnnnnnnnnnnnnnnnnnnnnnnnnnnnnnnnnnnnnnnnnnnnnnnnnnnnnnnnnnnnnnnnnnnnnnnnnnnnnnnnnnnnnnnnnnnnnnnnnnnnnnnnnnnnnnnnnnnnnnnnnnnnnnnnnnnnnnnnnnnnnnnnnnnnnnnnnnnnnnnnnnnnnnnnnnnnnnnnnnnnnnnnnnnnnnnnnnnnnnnnnnnnnnnnnnnnnnnnnnnnnnnnnnnnnnnnnnnnnnnnnnnnnnnnnnnnnnnnnnnnnnnnnnnnnnnnnnnnnnnnnnnnnnnnnnnnnnnnnnnnnnnnnnnnnnnnnnnnnnnnnnnnnnnnnnnnnnnnnnnnnnnnnnnnnnnnnnnnnnnnnnnnnnnnnnnnnnnnnnnnnnnnnnnnnnnnnnnnnnnnnnnnnnnnnnnnnnnnnnnnnnnnnnnnnnnnnnnnnnnnnnnnnnnnnnnnnnnnnnnnnnnnnnnnnnnnnnnnnnnnnnnnnnnnnnnnnnnnnnnnnnnnnnnnnnnnnnnnnnnnnnnnnnnnnnnnnnnnnnnnnnnnnnnnnnnnnnnnnnnnnnnnnnnnnnnnnnnnnnnnnnnnnnnnnnnnnnnnnnnnnnnnnnnnnnnnnnnnnnnnnnnnnnnnnnnnnnnnnnnnnnnnnnnnnnnnnnnnnnnnnnnnnnnnnnnnnnnnnnnnnnnnnnnnnnnnnnnnnnnnnnnnnnnnnnnnnnnnnnnnnnnnnnnnnnnnnnnnnnnnnnnnnnnnnnnnnnnnnnnnnnnnnnnnnnnnnnnnnnnnnnnnnnnnnnnnnnnnnnnnnnnnnnnnnnnnnnnnnnnnnnnnnnnnnnnnnnnnnnnnnnnnnnnnnnnnnnnnnnnnnnnnnnnnnnnnnnnnnnnnnnnnnnnnnnnnnnnnnnnnnnnnnnnnnnnnnnnnnnnnnnnnnnnnnnnnnnnnnnnnnnnnnnnnnnnnnnnnnnnnnnnnnnnnnnnnnnnnnnnnnnnnnnnnnnnnnnnnnnnnnnnnnnnnnnnnnnnnnnnnnnnnnnnnnnnnnnnnnnnnnnnnnnnnnnnnnnnnnnnnnnnnnnnnnnnnnnnnnnnnnnnnnnnnnnnnnnnnnnnnnnnnnnnnnnnnnnnnnnnnnnnnnnnnnnnnnnnnnnnnnnnnnnnnnnnnnnnnnnnnnnnnnnnnnnnnnnnnnnnnnnnnnnnnnnnnnnnnnnnnnnnnnnnnnnnnnnnnnnnnnnnnnnnnnnnnnnnnnnnnnnnnnnnnnnnnnnnnnnnnnnnnnnnnnnnnnnnnnnnnnnnnnnnnnnnnnnnnnnnnnnnnnnnnnnnnnnnnnnnnnnnnnnnnnnnnnnnnnnnnnnnnnnnnnnnnnnnnnnnnnnnnnnnnnnnnnnnnnnnnnnnnnnnnnnnnnnnnnnnnnnnnnnnnnnnnnnnnnnnnnnnnnnnnnnnnnnnnnnnnnnnnnnnnnnnnnnnnnnnnnnnnnnnnnnnnnnnnnnnnnnnnnnnnnnnnnnnnnnnnnnnnnnnnnnnnnnnnnnnnnnnnnnnnnnnnnnnnnnnnnnnnnnnnnnnnnnnnnnnnnnnnnnnnnnnnnnnnnnnnnnnnnnnnnnnnnnnnnnnnnnnnnnnnnnnnnnnnnnnnnnnnnnnnnnnnnnnnnnnnnnnnnnnnnnnnnnnnnnnnnnnnnnnnnnnnnnnnnnnnnnnnnnnnnnnnnnnnnnnnnnnnnnnnnnnnnnnnnnnnnnnnnnnnnnnnnnnnnnnnnnnnnnnnnnnnnnnnnnnnnnnnnnnnnnnnnnnnnnnnnnnnnnnnnnnnnnnnnnnnnnnnnnnnnnnnnnnnnnnnnnnnnnnnnnnnnnnnnnnnnnnnnnnnnnnnnnnnnnnnnnnnnnnnnnnnnnnnnnnnnnnnnnnnnnnnnnnnnnnnnnnnnnnnnnnnnnnnnnnnnnnnnnnnnnnnnnnnnnnnnnnnnnnnnnnnnnnnnnnnnnnnnnnnnnnnnnnnnnnnnnnnnnnnnnnnnnnnnnnnnnnnnnnnnnnnnnnnnnnnnnnnnnnnnnnnnnnnnnnnnnnnnnnnnnnnnnnnnnnnnnnnnnnnnnnnnnnnnnnnnnnnnnnnnnnnnnnnnnnnnnnnnnnnnnnnnnnnnnnnnnnnnnnnnnnnnnnnnnnnnnnnnnnnnnnnnnnnnnnnnnnnnnnnnnnnnnnnnnnnnnnnnnnnnnnnnnnnnnnnnnnnnnnnnnnnnnnnnnnnnnnnnnnnnnnnnnnnnnnnnnnnnnnnnnnnnnnnnnnnnnnnnnnnnnnnnnnnnnnnnnnnnnnnnnnnnnnnnnnnnnnnnnnnnnnnnnnnnnnnnnnnnnnnnnnnnnnnnnnnnnnnnnnnnnnnnnnnnnnnnnnnnnnnnnnnnnnnnnnnnnnnnnnnnnnnnnnnnnnnnnnnnnnnnnnnnnnnnnnnnnnnnnnnnnnnnnnnnnnnnnnnnnnnnnnnnnnnnnnnnnnnnnnnnnnnnnnnnnnnnnnnnnnnnnnnnnnnnnnnnnnnnnnnnnnnnnnnnnnnnnnnnnnnnnnnnnnnnnnnnnnnnnnnnnnnnnnnnnnnnnnnnnnnnnnnnnnnnnnnnnnnnnnnnnnnnnnnnnnnnnnnnnnnnnnnnnnnnnnnnnnnnnnnnnnnnnnnnnnnnnnnnnnnnnnnnnnnnnnnnnnnnnnnnnnnnnnnnnnnnnnnnnnnnnnnnnnnnnnnnnnnnnnnnnnnnnnnnnnnnnnnnnnnnnnnnnnnnnnnnnnnnnnnnnnnnnnnnnnnnnnnnnnnnnnnnnnnnnnnnnnnnnnnnnnnnnnnnnnnnnnnnnnnnnnnnnnnnnnnnnnnnnnnnnnnnnnnnnnnnnnnnnnnnnnnnnnnnnnnnnnnnnnnnnnnnnnnnnnnnnnnnnnnnnnnnnnnnnnnnnnnnnnnnnnnnnnnnnnnnnnnnnnnnnnnnnnnnnnnnnnnnnnnnnnnnnnnnnnnnnnnnnnnnnnnnnnnnnnnnnnnnnnnnnnnnnnnnnnnnnnnnnnnnnnnnnnnnnnnnnnnnnnnnnnnnnnnnnnnnnnnnnnnnnnnnnnnnnnnnnnnnnnnnnnnnnnnnnnnnnnnnnnnnnnnnnnnnnnnnnnnnnnnnnnnnnnnnnnnnnnnnnnnnnnnnnnnnnnnnnnnnnnnnnnnnnnnnnnnnnnnnnnnnnnnnnnnnnnnnnnnnnnnnnnnnnnnnnnnnnnnnnnnnnnnnnnnnnnnnnnnnnnnnnnnnnnnnnnnnnnnnnnnnnnnnnnnnnnnnnnnnnnnnnnnnnnnnnnnnnnnnnnnnnnnnnnnnnnnnnnnnnnnnnnnnnnnnnnnnnnnnnnnnnnnnnnnnnnnnnnnnnnnnnnnnnnnnnnnnnnnnnnnnnnnnnnnnnnnnnnnnnnnnnnnnnnnnnnnnnnnnnnnnnnnnnnnnnnnnnnnnnnnnnnnnnnnnnnnnnnnnnnnnnnnnnnnnnnnnnnnnnnnnnnnnnnnnnnnnnnnnnnnnnnnnnnnnnnnnnnnnnnnnnnnnnnnnnnnnnnnnnnnnnnnnnnnnnnnnnnnnnnnnnnnnnnnnnnnnnnnnnnnnnnnnnnnnnnnnnnnnnnnnnnnnnnnnnnnnnnnnnnnnnnnnnnnnnnnnnnnnnnnnnnnnnnnnnnnnnnnnnnnnnnnnnnnnnnnnnnnnnnnnnnnnnnnnnnnnnnnnnnnnnnnnnnnnnnnnnnnnnnnnnnnnnnnnnnnnnnnnnnnnnnnnnnnnnnnnnnnnnnnnnnnnnnnnnnnnnnnnnnnnnnnnnnnnnnnnnnnnnnnnnnnnnnnnnnnnnnnnnnnnnnnnnnnnnnnnnnnnnnnnnnnnnnnnnnnnnnnnnnnnnnnnnnnnnnnnnnnnnnnnnnnnnnnnnnnnnnnnnnnnnnnnnnnnnnnnnnnnnnnnnnnnnnnnnnnnnnnnnnnnnnnnnnnnnnnnnnnnnnnnnnnnnnnnnnnnnnnnnnnnnnnnnnnnnnnnnnnnnnnnnnnnnnnnnnnnnnnnnnnnnnnnnnnnnnnnnnnnnnnnnnnnnnnnnnnnnnnnnnnnnnnnnnnnnnnnnnnnnnnnnnnnnnnnnnnnnnnnnnnnnnnnnnnnnnnnnnnnnnnnnnnnnnnnnnnnnnnnnnnnnnnnnnnnnnnnnnnnnnnnnnnnnnnnnnnnnnnnnnnnnnnnnnnnnnnnnnnnnnnnnnnnnnnnnnnnnnnnnnnnnnnnnnnnnnnnnnnnnnnnnnnnnnnnnnnnnnnnnnnnnnnnnnnnnnnnnnnnnnnnnnnnnnnnnnnnnnnnnnnnnnnnnnnnnnnnnnnnnnnnnnnnnnnnnnnnnnnnnnnnnnnnnnnnnnnnnnnnnnnnnnnnnnnnnnnnnnnnnnnnnnnnnnnnnnnnnnnnnnnnnnnnnnnnnnnnnnnnnnnnnnnnnnnnnnnnnnnnnnnnnnnnnnnnnnnnnnnnnnnnnnnnnnnnnnnnnnnnnnnnnnnnnnnnnnnnnnnnnnnnnnnnnnnnnnnnnnnnnnnnnnnnnnnnnnnnnnnnnnnnnnnnnnnnnnnnnnnnnnnnnnnnnnnnnnnnnnnnnnnnnnnnnnnnnnnnnnnnnnnnnnnnnnnnnnnnnnnnnnnnnnnnnnnnnnnnnnnnnnnnnnnnnnnnnnnnnnnnnnnnnnnnnnnnnnnnnnnnnnnnnnnnnnnnnnnnnnnnnnnnnnnnnnnnnnnnnnnnnnnnnnnnnnnnnnnnnnnnnnnnnnnnnnnnnnnnnnnnnnnnnnnnnnnnnnnnnnnnnnnnnnnnnnnnnnnnnnnnnnnnnnnnnnnnnnnnnnnnnnnnnnnnnnnnnnnnnnnnnnnnnnnnnnnnnnnnnnnnnnnnnnnnnnnnnnnnnnnnnnnnnnnnnnnnnnnnnnnnnnnnnnnnnnnnnnnnnnnnnnnnnnnnnnnnnnnnnnnnnnnnnnnnnnnnnnnnnnnnnnnnnnnnnnnnnnnnnnnnnnnnnnnnnnnnnnnnnnnnnnnnnnnnnnnnnnnnnnnnnnnnnnnnnnnnnnnnnnnnnnnnnnnnnnnnnnnnnnnnnnnnnnnnnnnnnnnnnnnnnnnnnnnnnnnnnnnnnnnnnnnnnnnnnnnnnnnnnnnnnnnnnnnnnnnnnnnnnnnnnnnnnnnnnnnnnnnnnnnnnnnnnnnnnnnnnnnnnnnnnnnnnnnnnnnnnnnnnnnnnnnnnnnnnnnnnnnnnnnnnnnnnnnnnnnnnnnnnnnnnnnnnnnnnnnnnnnnnnnnnnnnnnnnnnnnnnnnnnnnnnnnnnnnnnnnnnnnnnnnnnnnnnnnnnnnnnnnnnnnnnnnnnnnnnnnnnnnnnnnnnnnnnnnnnnnnnnnnnnnnnnnnnnnnnnnnnnnnnnnnnnnnnnnnnnnnnnnnnnnnnnnnnnnnnnnnnnnnnnnnnnnnnnnnnnnnnnnnnnnnnnnnnnnnnnnnnnnnnnnnnnnnnnnnnnnnnnnnnnnnnnnnnnnnnnnnnnnnnnnnnnnnnnnnnnnnnnnnnnnnnnnnnnnnnnnnnnnnnnnnnnnnnnnnnnnnnnnnnnnnnnnnnnnnnnnnnnnnnnnnnnnnnnnnnnnnnnnnnnnnnnnnnnnnnnnnnnnnnnnnnnnnnnnnnnnnnnnnnnnnnnnnnnnnnnnnnnnnnnnnnnnnnnnnnnnnnnnnnnnnnnnnnnnnnnnnnnnnnnnnnnnnnnnnnnnnnnnnnnnnnnnnnnnnnnnnnnnnnnnnnnnnnnnnnnnnnnnnnnnnnnnnnnnnnnnnnnnnnnnnnnnnnnnnnnnnnnnnnnnnnnnnnnnnnnnnnnnnnnnnnnnnnnnnnnnnnnnnnnnnnnnnnnnnnnnnnnnnnnnnnnnnnnnnnnnnnnnnnnnnnnnnnnnnnnnnnnnnnnnnnnnnnnnnnnnnnnnnnnnnnnnnnnnnnnnnnnnnnnnnnnnnnnnnnnnnnnnnnnnnnnnnnnnnnnnnnnnnnnnnnnnnnnnnnnnnnnnnnnnnnnnnnnnnnnnnnnnnnnnnnnnnnnnnnnnnnnnnnnnnnnnnnnnnnnnnnnnnnnnnnnnnnnnnnnnnnnnnnnnnnnnnnnnnnnnnnnnnnnnnnnnnnnnnnnnnnnnnnnnnnnnnnnnnnnnnnnnnnnnnnnnnnnnnnnnnnnnnnnnnnnnnnnnnnnnnnnnnnnnnnnnnnnnnnnnnnnnnnnnnnnnnnnnnnnnnnnnnnnnnnnnnnnnnnnnnnnnnnnnnnnnnnnnnnnnnnnnnnnnnnnnnnnnnnnnnnnnnnnnnnnnnnnnnnnnnnnnnnnnnnnnnnnnnnnnnnnnnnnnnnnnnnnnnnnnnnnnnnnnnnnnnnnnnnnnnnnnnnnnnnnnnnnnnnnnnnnnnnnnnnnnnnnnnnnnnnnnnnnnnnnnnnnnnnnnnnnnnnnnnnnnnnnnnnnnnnnnnnnnnnnnnnnnnnnnnnnnnnnnnnnnnnnnnnnnnnnnnnnnnnnnnnnnnnnnnnnnnnnnnnnnnnnnnnnnnnnnnnnnnnnnnnnnnnnnnnnnnnnnnnnnnnnnnnnnnnnnnnnnnnnnnnnnnnnnnnnnnnnnnnnnnnnnnnnnnnnnnnnnnnnnnnnnnnnnnnnnnnnnnnnnnnnnnnnnnnnnnnnnnnnnnnnnnnnnnnnnnnnnnnnnnnnnnnnnnnnnnnnnnnnnnnnnnnnnnnnnnnnnnnnnnnnnnnnnnnnnnnnnnnnnnnnnnnnnnnnnnnnnnnnnnnnnnnnnnnnnnnnnnnnnnnnnnnnnnnnnnnnnnnnnnnnnnnnnnnnnnnnnnnnnnnnnnnnnnnnnnnnnnnnnnnnnnnnnnnnnnnnnnnnnnnnnnnnnnnnnnnnnnnnnnnnnnnnnnnnnnnnnnnnnnnnnnnnnnnnnnnnnnnnnnnnnnnnnnnnnnnnnnnnnnnnnnnnnnnnnnnnnnnnnnnnnnnnnnnnnnnnnnnnnnnnnnnnnnnnnnnnnnnnnnnnnnnnnnnnnnnnnnnnnnnnnnnnnnnnnnnnnnnnnnnnnnnnnnnnnnnnnnnnnnnnnnnnnnnnnnnnnnnnnnnnnnnnnnnnnnnnnnnnnnnnnnnnnnnnnnnnnnnnnnnnnnnnnnnnnnnnnnnnnnnnnnnnnnnnnnnnnnnnnnnnnnnnnnnnnnnnnnnnnnnnnnnnnnnnnnnnnnnnnnnnnnnnnnnnnnnnnnnnnnnnnnnnnnnnnnnnnnnnnnnnnnnnnnnnnnnnnnnnnnnnnnnnnnnnnnnnnnnnnnnnnnnnnnnnnnnnnnnnnnnnnnnnnnnnnnnnnnnnnnnnnnnnnnnnnnnnnnnnnnnnnnnnnnnnnnnnnnnnnnnnnnnnnnnnnnnnnnnnnnnnnnnnnnnnnnnnnnnnnnnnnnnnnnnnnnnnnnnnnnnnnnnnnnnnnnnnnnnnnnnnnnnnnnnnnnnnnnnnnnnnnnnnnnnnnnnnnnnnnnnnnnnnnnnnnnnnnnnnnnnnnnnnnnnnnnnnnnnnnnnnnnnnnnnnnnnnnnnnnnnnnnnnnnnnnnnnnnnnnnnnnnnnnnnnnnnnnnnnnnnnnnnnnnnnnnnnnnnnnnnnnnnnnnnnnnnnnnnnnnnnnnnnnnnnnnnnnnnnnnnnnnnnnnnnnnnnnnnnnnnnnnnnnnnnnnnnnnnnnnnnnnnnnnnnnnnnnnnnnnnnnnnnnnnnnnnnnnnnnnnnnnnnnnnnnnnnnnnnnnnnnnnnnnnnnnnnnnnnnnnnnnnnnnnnnnnnnnnnnnnnnnnnnnnnnnnnnnnnnnnnnnnnnnnnnnnnnnnnnnnnnnnnnnnnnnnnnnnnnnnnnnnnnnnnnnnnnnnnnnnnnnnnnnnnnnnnnnnnnnnnnnnnnnnnnnnnnnnnnnnnnnnnnnnacccccgagcccctttcggggctaacggttttcaagaccgccggtttcaaccactcacccatccctccgggaagtccacttcaacggtatgaagcaatcggctttattttagcagaacaagcgccggctgaagaaccggttgcggagccttttgccccggggtcgaacttgggggagcgtgctcgcatgaaattcaccaaacatcagtattctcggccgaaggatggcttgttcgttaaagccttccacaaaaaaccccctgcatttctcgaaaaattttcgtaaaatgtgaagccttccggtgaacctccggcaaagaggaggggggcatgagctacaacctacttgaggaagattggattccagttctatggaagactggaaagctcactcgcgtcaacctcattcaggtgctcactgaagcacactgcatccgccagattgccgccaccaatcccatggaccgcgtggccaccctgcgttttctgctcgcactgctttattggtgcgtaggggatccaccgcgcgatccaacctcgggtggcaccttttccgaagcatggtttaccaaactctatgaaaacaaggaatgcttcaatttgctgggagacggaatccggttctatcagtaccgtccaggctcgggaaaagacaaaaagctttccgtcaactatctcattcatgaagtgccgacggggtccaatgtacggcatttccggcattccgcggacggagttaacggcctttgtcgggcgtgttgtgccacagggttgttgcggctacctgtattcaccacccaaggggggaaaggaaaatcaccaggcatcaatggcaaaccccccgtctacgtcatacctctcggacgatccctgtgtgagaccttgtggctctcttggcgaccacagtcgaatttgggtacgcctgcatgggagaagcctgacatggcactgcccaagactggcgaagtccccctcctgaccgggctcacatggctgccgcgacgcgtttggctggacgaccccatggaacccgaagtcccttgtatttgttgcgggcgaaaagagcttctgattcggcagtgcatatttgccggcatcggtagcggcaaggcggatggccgagtttggaacgacccgcacgtcgttcgtgacaaaaatgtggtgatgacaccaagtaatgcccttgccgattccgataaagcggctgacgattgggcaaagataactgcggcgatcctcatcgataccaagcacacttccagacgccgattctgggttgttggtttcgcaagtaaacaggacaagtacctggaagcgaaggaatttgagattttccttcaacctaccacggaaagtgctcagattcaagatgccatcaaggagatcgagagatggcaaagagaagcagcggggctggcaaaaagagttgtcagagtggtgaagaacaagaaatcctcgcgaaaacatgttgagatcgacgccctggtaaaagccattcggcctcatatcgaagccagtgcctctgtgaaattgaaccgcctcatttccgacggccacccggcatgggagggggcggccaactactatgaagggatgatggttgccatctctagatcaatttctccggattttacggccacagcgctacgacagcggcaggaaattgcgcgcgttaaaccagacatgcggttaaaaacagagaaggcagggaatctgaccgcaagagaggcgataagtgactccaacagaacagtacatcaaacgcctgacacacctgaagaccggtgacctcggattgctgcgcacccacgcggggcaggagctcgatgagaaggtagagggcttcgacctgtttacgggcctatggtggccgctgcgtcaaaggaactcgcgggcaccccgccgtgacgtggcatggctcgtcgccaagctctatgccttccggccactcgagtattcggcggaagagacgctagctttccttcttgggcaatgccaaccagaagttggcaagcgggagaagttcatccagcggtttgataggatgctgactctgcccatccgcaaaatcgaacctgcgttgcaatgggcgcttgacgtgctcaattcaaagggcatgggactcgactggataaaactcacggatgatctttcggtttgggaacgagaatccacccgtctcgaatgggcaaaggaatttttgaagtctctaggaggaggataaatgctgatccagattcacgctattcaaaatcacgctccggccaatttgaaccgagatgacttgggcgcgcccaaagcctgctatttcggcggtgtgctgcgctcgcgcatctccagccaatgcctcaagcgcagcatccgtagaagcgacgagttcaggcagttgctaggcggtgttcgtacgcggcaattagcgaaattgatagctgacaagattcccgagaaagatgtgaggaagcgtgcggagaagattcttgaaatatgcggattcaagccctggagatcggaaggcgagtccgaaaattctgagaagagcaaaatgcttgtctatactaccaaacaggctgttgaagagatggcgaacctcctccgaaacagcgatggaaaggctgagagtgaactggcggaggggttcgccggacttattgcggagcgcacggcagttccggacatggccttgtcgggccgcatgctggagccggacaaatcttctacggtttgggagaagcgtgatactaaggtggaagcagcacttcaagtggcccatgcaatctccacccatgaggcccgccccgaggtggattactacgtcgctgccgatgacatccccggcgaggacgcgggtgccggctttgtggacgaggctatgtttgcctcggcctgtttttacaaatatttctcaatccactgggagcaattggtgaaaaacctcatggggtttggggaagaacatgaaaagctggccgcacatacggtgggcgcattcattcggggggctgcgatggtgaaccccactggaaaacagaacagtttcgccgcgcataatcctcccgatggcatgctggttgagatcagggacacccctctcagctacgccaacgcttttgcgaaacccgcggttgctcagggtgaacgtgacctcatcgcccagagcatcgcgcagcttggccaatacatccacgacatggacaccgggtacggtaagccaacggagcgattctggttctcgcctaattcccgccatcctctgctggcttacatcgaggaagaacaagatggaaaaaagaaacgacgtgagattgcgcttaccgacaataatctcagttcgctcgatatcttaattcaaaaggtcatcgagaaaatcggccacaattggcatgaggttcagaaaattactgtgaacgcagaggtggtttgatgagggccaacaccttatttcttcgcttggagggtcttcttcaagcctggggagaccaccagtcaaagtttgtcatccgacggacggcggaagctccgaccaagtctggcgttgtcgggatgctgtgcgccgccctgggggttagcagatgtaaagcctctaatgaatggcttcgaaagctgggctcgctttgtatgggggcgcgcattgatgcgccgggtgtccgctggtgggactatcagacggtcggagccaaggtcggaatacccagggcagatggtgctggcgctaagagaacggccgcgacgggggaaattgaaactctcatcacgcgtcgcgaatatctctgcgacgcatccttcctgatcgctttgcagggtgaggccgacctgatagcgcagttggagaccgcagtaggagcgcccaagtggacgctctatcttggtagaaaatgctgccctccgtcacgccctttgctggaaaaacccgcaagcggtgagtttcccgatttactctcagcccttaagtcgattccttggcgcaaacggatgaaggaggatcaaccgcccaaaacggttgactgcctgctcgattggcagcccacggcagatcagcctgaagcgcctgatgatgccttcgtctggtatgatgtgccccgcacctttgaaccaccctcgcacgaaccccgattcgtgctccggcgtcaattgccagtggccatcgagggcggcgtgggcgtcgcaggccagccggcgcagaccgaaactccgccgccgccccgcccgcgggccgattacaccaactccgcctacaggaacaagcgcctggagcggcttgcccgcgaccagcagctttgcgttttttgcaaggcgccagccacaacggtacaacacatcacctatcggcgcgccggaggcaatgaaagcttggaagatctgcgttcgctctgccgtttgtgtcatgacgccgtgaccatgatcgagtatggtttaaacatgggtctggatcggatcaatcccgaagagccacgttggcgcgaccagattattgccaagcggaacgagatcatcgccttccgctcgctcgaaacgcgtcggcgacgcctcgctccagaggaggtggaatagccatgtggatttcgtgtctcctgatcgacgtcggtgacaatcccgaccgcccccgccccgggcgccaatggctgcgaaacctctatcgcgttcaccagcgcctttgcatggcgtttccctccgaccgcagaaagcagtacgacccagagtttttaaagccctaccagccagaggattttgggaacggccatgttcatgttgagcgcgggccgaccgctggctttctcttccgccttgatcccgaggaacgatgttgccgcgaagcatcacaggctcggcattccggcagtcgggtggtaattctggtacagtctgcaccaaaacctgactgggaatacgcctttcacaacgcctgttatctgctggccgccccgccggaagtaaagccattcaacccgtgctacacaacgggtcagcggcttcgattccgcctccttgcgaatcctacccgccgcctcacggaacactcgcttggagccgacggacagctcgtcaagaaatgggcgaatacggataagaaagggatgcgcgtgcctgtgccgacggatcaactcctcgattggatcaatcggcgagctgaaaaggcggggttttctatcgagaaggattccatcaatgttttgccgggttatgtgttcgccaacaaaagaggggacaggcatggaattcgcctgcgctctgtccgttatgacgggcttctcagcgttaccgagcccgcactgtttcggcaagcgattatacaaggcatcgggccaggcaaagctttcggcttcgggctgctttcggtagcgccgtgttgtaccggaggtctatgaccgccatttttgacctcctgccccgtttgattctttacagtggagaccacaccatcgccacacttaccactaccgggcccttcctcagcgaagagggtaattccccgccttggttaaggaggggataaggggtggttggtgtaaagaacgggctgagagaggacgccagccgcctcgatcatcgatggggcgcagctacaaaaacatgaaagacctccatctgttgcccaaagtccgcgatagttccagtttcctttacgtcgagcattgcaagatcgaccaggagggcaaagcgatcgccattcacgacgcgaagggccgagtgccagtaccctgcgcgtcattgctggtgctgatgctcggtcccggcaccagcatcacgcacgcggctgtgcgatctcttgctgacaatggctgcaccatcctctggacgggcgaagagggcgtccgaacctacgctcagggcatgggagaaacgcgctcttccgaacgcctgctgcatcagtcacgcctctgctctgcgcccgaattgcgcttcatagtggttaaaaggctttacaagatgcgtttcccggagaagctggacccctccctgaccatccagcaattgcgcggcatggagggtgtccgggtgcgcgacgcatacttccgcgccagccgcgaggcgggcattccgtggtccggccgatcctacaaaaccgataactggcaggccgccgatgccgtcaatcgcgccctttcggtggccaacagttgcctctacggcgtctgccacgccgccattgtttccgtcggttattcaccggccttgggatttattcacaccggaaagatgctctcctttgtctacgatgttgccgacctgtataaaaccgaagtcaccattcccctcgcctttcgggccgcagccgaaggaatgggctttcaggaaagccacgtaagaaggaaatgtcgcgacgcgtttgtggaaagccgcttattacagagaattatccccgatatcgaccgcgctctcgattggggttcttcggaaggtgggcagggggatgccagactggatgcccaaccagcggctccagggtggctctgggatcccgaagtgggggcggtggagggaggcatcaaccgcggagatgatgctgaaggaggtgacaagccacggtcgtgatggtgctcgaaaatgcccctcccagcgtgcgcggggaactgacacgatggatgctggaattgcatgctggcgtttttgtgggaaacatttccgcgctggtgcgggaaaagctctggcaggaagtctgccgcaaattggcgggtggggctggaattctggtctacaatgctgccaacgagcaggggtttgatatccgcttttggggatcgccctctcggcgggtcgaaaacttcgagggacttcttctagttcgcgggccataagccctttaaatcgcagcgtcgtccccacgcgtgtgggggtgaaccgttcatcggcgcccggccaatcaagattacgcggtcgtccccacgcgtgtgggggtgaaccatgatctgaatcgcttccgtaatcggccttcttgtcgtccccacgcgtgtgggggtgaaccgccccgcggacggccaacgaagggcgtgagacagtcgtccccacgcgtgtgggggtgaaccgcttcgccgttccgcgagactgcaggcttggatgtcgtccccacgcgtgtgggggtgaaccgcttaaccctatcccctatcccaaacccttcccgtcgtccccacgcgtgtgggggtgaaccgacaactcgcgcgataacagccagttacggaccgtcgtccccacgcgtgtgggggtgaaccgtccccaacgacggggacaatctgcgggaagctgtcgtccccacgcgtgtgggggtgaaccgtgtccggtttgtgccaaaattttaagcaaggcgtcgtccccacgcgtgtgggggtgaaccgtccgtgtggaacgttgtcatggtacttcgttcgtcgtccccacgcgtgtgggggtgaaccgctgccgctgaaggatgggatttggcagcggtcgtcgtccccacgcgtgtgggggtgaaccgcgccatgttggggtgggatgtgtcgtaggcccgtcgtccccacgcgtgtgggggtgaaccggacgccagcctcgatgagaaaaccatcaccgcgtcgtccccacgcgtgtgggggtgaaccgctggctgcggtgcttgaggccaatgtcacactgtcgtccccacgcgtgtgggggtgaaccgcctccctcttttccaccgaccttcccgcctgcgtcgtccccacgcgtgtgggggtgaaccgattctggctggattaaaagcagcggaccggcagtcgtccccacgcgtgtgggggtgaaccgcgtaccatgaatctgacaaaccctttcctgacgtcgtccccacgcgtgtgggggtgaaccgtcttgacttggagtgatcagggtgatatggaagtcgtccccacgcgtgtgggggtgaaccgtcttgacttggagtgatcagggtgatatggaagtcgtccccacgcgtgtgggggtgaaccgcgatgcgagagtttgaagaaaagaccaatgccgtcgtccccacgcgtgtgggggtgaaccgaaggagctgctggccgatgctgacggcgaaccgtcgtccccacgcgtgtgggggtgaaccgatcctcgcgagtgtgttagtccgttctgtggcagtcgtccccacgcgtgtgggggtgaaccgatgtgcccgcgaagctcctgatgacgcgcgacgtcgtccccacgcgtgtgggggtgaaccgagcaagaaaattggcactcttgaagagctaacgtcgtccccacgcgtgtgggggtgaaccgttggcgcggagaatcttttctcggtccgtaaagtcgtccccacgcgtgtgggggtgaaccgataatgccgcccgactttcaggaggtgcggatgtcgtccccacgcgtgtgggggtgaaccgctgaaggaattgaaagacgaaaaatcgctgaggccatcccccgcacgcccggagggtgaaccggctaatgtcaaatctcagtgtcgaaattgcgaataggcagaggtaaaccggggtttgtaatttaagatttcagattcccgtccccgcacggcccatgcct

SEQ ID NO: 1081 - DNA, 105108 bp, Artificial Sequence; identical to SEQ ID NO: 1080
  Synthetic Oligonucleotide
  misc_feature (1)..(96580): n is a, c, g, or t

SEQ ID NO: 1082 - DNA, 105108 bp, Artificial Sequence; identical to SEQ ID NO: 1080
  Synthetic Oligonucleotide
  misc_feature (1)..(96580): n is a, c, g, or t

SEQ ID NO: 1083 - DNA, 105108 bp, Artificial Sequence; identical to SEQ ID NO: 1080
  Synthetic Oligonucleotide
  misc_feature (1)..(96580): n is a, c, g, or t

SEQ ID NO: 1084 - DNA, 107378 bp, Artificial Sequence
  Synthetic Oligonucleotide
  misc_feature (1)..(98861): n is a, c, g, or t
nnnnnnnnnnnnnnnnnnnnnnnnnnnnnnnnnnnnnnnnnnnnnnnnnnnnnnnnnnnnnnnnnnnnnnnnnnnnnnnnnnnnnnnnnnnnnnnnnnnnnnnnnnnnnnnnnnnnnnnnnnnnnnnnnnnnnnnnnnnnnnnnnnnnnnnnnnnnnnnnnnnnnnnnnnnnnnnnnnnnnnnnnnnnnnnnnnnnnnnnnnnnnnnnnnnnnnnnnnnnnnnnnnnnnnnnnnnnnnnnnnnnnnnnnnnnnnnnnnnnnnnnnnnnnnnnnnnnnnnnnnnnnnnnnnnnnnnnnnnnnnnnnnnnnnnnnnnnnnnnnnnnnnnnnnnnnnnnnnnnnnnnnnnnnnnnnnnnnnnnnnnnnnnnnnnnnnnnnnnnnnnnnnnnnnnnnnnnnnnnnnnnnnnnnnnnnnnnnnnnnnnnnnnnnnnnnnnnnnnnnnnnnnnnnnnnnnnnnnnnnnnnnnnnnnnnnnnnnnnnnnnnnnnnnnnnnnnnnnnnnnnnnnnnnnnnnnnnnnnnnnnnnnnnnnnnnnnnnnnnnnnnnnnnnnnnnnnnnnnnnnnnnnnnnnnnnnnnnnnnnnnnnnnnnnnnnnnnnnnnnnnnnnnnnnnnnnnnnnnnnnnnnnnnnnnnnnnnnnnnnnnnnnnnnnnnnnnnnnnnnnnnnnnnnnnnnnnnnnnnnnnnnnnnnnnnnnnnnnnnnnnnnnnnnnnnnnnnnnnnnnnnnnnnnnnnnnnnnnnnnnnnnnnnnnnnnnnnnnnnnnnnnnnnnnnnnnnnnnnnnnnnnnnnnnnnnnnnnnnnnnnnnnnnnnnnnnnnnnnnnnnnnnnnnnnnnnnnnnnnnnnnnnnnnnnnnnnnnnnnnnnnnnnnnnnnnnnnnnnnnnnnnnnnnnnnnnnnnnnnnnnnnnnnnnnnnnnnnnnnnnnnnnnnnnnnnnnnnnnnnnnnnnnnnnnnnnnnnnnnnnnnnnnnnnnnnnnnnnnnnnnnnnnnnnnnnnnnnnnnnnnnnnnnnnnnnnnnnnnnnnnnnnnnnnnnnnnnnnnnnnnnnnnnnnnnnnnnnnnnnnnnnnnnnnnnnnnnnnnnnnnnnnnnnnnnnnnnnnnnnnnnnnnnnnnnnnnnnnnnnnnnnnnnnnnnnnnnnnnnnnnnnnnnnnnnnnnnnnnnnnnnnnnnnnnnnnnnnnnnnnnnnnnnnnnnnnnnnnnnnnnnnnnnnnnnnnnnnnnnnnnnnnnnnnnnnnnnnnnnnnnnnnnnnnnnnnnnnnnnnnnnnnnnnnnnnnnnnnnnnnnnnnnnnnnnnnnnnnnnnnnnnnnnnnnnnnnnnnnnnnnnnnnnnnnnnnnnnnnnnnnnnnnnnnnnnnnnnnnnnnnnnnnnnnnnnnnnnnnnnnnnnnnnnnnnnnnnnnnnnnnnnnnnnnnnnnnnnnnnnnnnnnnnnnnnnnnnnnnnnnnnnnnnnnnnnnnnnnnnnnnnnnnnnnnnnnnnnnnnnnnnnnnnnnnnnnnnnnnnnnnnnnnnnnnnnnnnnnnnnnnnnnnnnnnnnnnnnnnnnnnnnnnnnnnnnnnnnnnnnnnnnnnnnnnnnnnnnnnnnnnnnnnnnnnnnnnnnnnnnnnnnnnnnnnnnnnnnnnnnnnnnnnnnnnnnnnnnnnnnnnnnnnnnnnnnnnnnnnnnnnnnnnnnnnnnnnnnnnnnnnnnnnnnnnnnnnnnnnnnnnnnnnnnnnnnnnnnnnnnnnnnnnnnnnnnnnnnnnnnnnnnnnnnnnnnnnnnnnnnnnnnnnnnnnnnnnnnnnnnnnnnnnnnnnnnnnnnnnnnnnnnnnnnnnnnnnnnnnnnnnnnnnnnnnnnnnnnnnnnnnnnnnnnnnnnnnnnnnnnnnnnnnnnnnnnnnnnnnnnnnnnnnnnnnnnnnnnnnnnnnnnnnnnnnnnnnnnnnnnnnnnnnnnnnnnnnnnnnnnnnnnnnnnnnnnnnnnnnnnnnnnnnnnnnnnnnnnnnnnnnnnnnnnnnnnnnnnnnnnnnnnnnnnnnnnnnnnnnnnnnnnnnnnnnnnnnnnnnnnnnnnnnnnnnnnnnnnnnnnnnnnnnnnnnnnnnnnnnnnnnnnnnnnnnnnnnnnnnnnnnnnnnnnnnnnnnnnnnnnnnnnnnnnnnnnnnnnnnnnnnnnnnnnnnnnnnnnnnnnnnnnnnnnnnnnnnnnnnnnnnnnnnnnnnnnnnnnnnnnnnnnnnnnnnnnnnnnnnnnnnnnnnnnnnnnnnnnnnnnnnnnnnnnnnnnnnnnnnnnnnnnnnnnnnnnnnnnnnnnnnnnnnnnnnnnnnnnnnnnnnnnnnnnnnnnnnnnnnnnnnnnnnnnnnnnnnnnnnnnnnnnnnnnnnnnnnnnnnnnnnnnnnnnnnnnnnnnnnnnnnnnnnnnnnnnnnnnnnnnnnnnnnnnnnnnnnnnnnnnnnnnnnnnnnnnnnnnnnnnnnnnnnnnnnnnnnnnnnnnnnnnnnnnnnnnnnnnnnnnnnnnnnnnnnnnnnnnnnnnnnnnnnnnnnnnnnnnnnnnnnnnnnnnnnnnnnnnnnnnnnnnnnnnnnnnnnnnnnnnnnnnnnnnnnnnnnnnnnnnnnnnnnnnnnnnnnnnnnnnnnnnnnnnnnnnnnnnnnnnnnnnnnnnnnnnnnnnnnnnnnnnnnnnnnnnnnnnnnnnnnnnnnnnnnnnnnnnnnnnnnnnnnnnnnnnnnnnnnnnnnnnnnnnnnnnnnnnnnnnnnnnnnnnnnnnnnnnnnnnnnnnnnnnnnnnnnnnnnnnnnnnnnnnnnnnnnnnnnnnnnnnnnnnnnnnnnnnnnnnnnnnnnnnnnnnnnnnnnnnnnnnnnnnnnnnnnnnnnnnnnnnnnnnnnnnnnnnnnnnnnnnnnnnnnnnnnnnnnnnnnnnnnnnnnnnnnnnnnnnnnnnnnnnnnnnnnnnnnnnnnnnnnnnnnnnnnnnnnnnnnnnnnnnnnnnnnnnnnnnnnnnnnnnnnnnnnnnnnnnnnnnnnnnnnnnnnnnnnnnnnnnnnnnnnnnnnnnnnnnnnnnnnnnnnnnnnnnnnnnnnnnnnnnnnnnnnnnnnnnnnnnnnnnnnnnnnnnnnnnnnnnnnnnnnnnnnnnnnnnnnnnnnnnnnnnnnnnnnnnnnnnnnnnnnnnnnnnnnnnnnnnnnnnnnnnnnnnnnnnnnnnnnnnnnnnnnnnnnnnnnnnnnnnnnnnnnnnnnnnnnnnnnnnnnnnnnnnnnnnnnnnnnnnnnnnnnnnnnnnnnnnnnnnnnnnnnnnnnnnnnnnnnnnnnnnnnnnnnnnnnnnnnnnnnnnnnnnnnnnnnnnnnnnnnnnnnnnnnnnnnnnnnnnnnnnnnnnnnnnnnnnnnnnnnnnnnnnnnnnnnnnnnnnnnnnnnnnnnnnnnnnnnnnnnnnnnnnnnnnnnnnnnnnnnnnnnnnnnnnnnnnnnnnnnnnnnnnnnnnnnnnnnnnnnnnnnnnnnnnnnnnnnnnnnnnnnnnnnnnnnnnnnnnnnnnnnnnnnnnnnnnnnnnnnnnnnnnnnnnnnnnnnnnnnnnnnnnnnnnnnnnnnnnnnnnnnnnnnnnnnnnnnnnnnnnnnnnnnnnnnnnnnnnnnnnnnnnnnnnnnnnnnnnnnnnnnnnnnnnnnnnnnnnnnnnnnnnnnnnnnnnnnnnnnnnnnnnnnnnnnnnnnnnnnnnnnnnnnnnnnnnnnnnnnnnnnnnnnnnnnnnnnnnnnnnnnnnnnnnnnnnnnnnnnnnnnnnnnnnnnnnnnnnnnnnnnnnnnnnnnnnnnnnnnnnnnnnnnnnnnnnnnnnnnnnnnnnnnnnnnnnnnnnnnnnnnnnnnnnnnnnnnnnnnnnnnnnnnnnnnnnnnnnnnnnnnnnnnnnnnnnnnnnnnnnnnnnnnnnnnnnnnnnnnnnnnnnnnnnnnnnnnnnnnnnnnnnnnnnnnnnnnnnnnnnnnnnnnnnnnnnnnnnnnnnnnnnnnnnnnnnnnnnnnnnnnnnnnnnnnnnnnnnnnnnnnnnnnnnnnnnnnnnnnnnnnnnnnnnnnnnnnnnnnnnnnnnnnnnnnnnnnnnnnnnnnnnnnnnnnnnnnnnnnnnnnnnnnnnnnnnnnnnnnnnnnnnnnnnnnnnnnnnnnnnnnnnnnnnnnnnnnnnnnnnnnnnnnnnnnnnnnnnnnnnnnnnnnnnnnnnnnnnnnnnnnnnnnnnnnnnnnnnnnnnnnnnnnnnnnnnnnnnnnnnnnnnnnnnnnnnnnnnnnnnnnnnnnnnnnnnnnnnnnnnnnnnnnnnnnnnnnnnnnnnnnnnnnnnnnnnnnnnnnnnnnnnnnnnnnnnnnnnnnnnnnnnnnnnnnnnnnnnnnnnnnnnnnnnnnnnnnnnnnnnnnnnnnnnnnnnnnnnnnnnnnnnnnnnnnnnnnnnnnnnnnnnnnnnnnnnnnnnnnnnnnnnnnnnnnnnnnnnnnnnnnnnnnnnnnnnnnnnnnnnnnnnnnnnnnnnnnnnnnnnnnnnnnnnnnnnnnnnnnnnnnnnnnnnnnnnnnnnnnnnnnnnnnnnnnnnnnnnnnnnnnnnnnnnnnnnnnnnnnnnnnnnnnnnnnnnnnnnnnnnnnnnnnnnnnnnnnnnnnnnnnnnnnnnnnnnnnnnnnnnnnnnnnnnnnnnnnnnnnnnnnnnnnnnnnnnnnnnnnnnnnnnnnnnnnnnnnnnnnnnnnnnnnnnnnnnnnnnnnnnnnnnnnnnnnnnnnnnnnnnnnnnnnnnnnnnnnnnnnnnnnnnnnnnnnnnnnnnnnnnnnnnnnnnnnnnnnnnnnnnnnnnnnnnnnnnnnnnnnnnnnnnnnnnnnnnnnnnnnnnnnnnnnnnnnnnnnnnnnnnnnnnnnnnnnnnnnnnnnnnnnnnnnnnnnnnnnnnnnnnnnnnnnnnnnnnnnnnnnnnnnnnnnnnnnnnnnnnnnnnnnnnnnnnnnnnnnnnnnnnnnnnnnnnnnnnnnnnnnnnnnnnnnnnnnnnnnnnnnnnnnnnnnnnnnnnnnnnnnnnnnnnnnnnnnnnnnnnnnnnnnnnnnnnnnnnnnnnnnnnnnnnnnnnnnnnnnnnnnnnnnnnnnnnnnnnnnnnnnnnnnnnnnnnnnnnnnnnnnnnnnnnnnnnnnnnnnnnnnnnnnnnnnnnnnnnnnnnnnnnnnnnnnnnnnnnnnnnnnnnnnnnnnnnnnnnnnnnnnnnnnnnnnnnnnnnnnnnnnnnnnnnnnnnnnnnnnnnnnnnnnnnnnnnnnnnnnnnnnnnnnnnnnnnnnnnnnnnnnnnnnnnnnnnnnnnnnnnnnnnnnnnnnnnnnnnnnnnnnnnnnnnnnnnnnnnnnnnnnnnnnnnnnnnnnnnnnnnnnnnnnnnnnnnnnnnnnnnnnnnnnnnnnnnnnnnnnnnnnnnnnnnnnnnnnnnnnnnnnnnnnnnnnnnnnnnnnnnnnnnnnnnnnnnnnnnnnnnnnnnnnnnnnnnnnnnnnnnnnnnnnnnnnnnnnnnnnnnnnnnnnnnnnnnnnnnnnnnnnnnnnnnnnnnnnnnnnnnnnnnnnnnnnnnnnnnnnnnnnnnnnnnnnnnnnnnnnnnnnnnnnnnnnnnnnnnnnnnnnnnnnnnnnnnnnnnnnnnnnnnnnnnnnnnnnnnnnnnnnnnnnnnnnnnnnnnnnnnnnnnnnnnnnnnnnnnnnnnnnnnnnnnnnnnnnnnnnnnnnnnnnnnnnnnnnnnnnnnnnnnnnnnnnnnnnnnnnnnnnnnnnnnnnnnnnnnnnnnnnnnnnnnnnnnnnnnnnnnnnnnnnnnnnnnnnnnnnnnnnnnnnnnnnnnnnnnnnnnnnnnnnnnnnnnnnnnnnnnnnnnnnnnnnnnnnnnnnnnnnnnnnnnnnnnnnnnnnnnnnnnnnnnnnnnnnnnnnnnnnnnnnnnnnnnnnnnnnnnnnnnnnnnnnnnnnnnnnnnnnnnnnnnnnnnnnnnnnnnnnnnnnnnnnnnnnnnnnnnnnnnnnnnnnnnnnnnnnnnnnnnnnnnnnnnnnnnnnnnnnnnnnnnnnnnnnnnnnnnnnnnnnnnnnnnnnnnnnnnnnnnnnnnnnnnnnnnnnnnnnnnnnnnnnnnnnnnnnnnnnnnnnnnnnnnnnnnnnnnnnnnnnnnnnnnnnnnnnnnnnnnnnnnnnnnnnnnnnnnnnnnnnnnnnnnnnnnnnnnnnnnnnnnnnnnnnnnnnnnnnnnnnnnnnnnnnnnnnnnnnnnnnnnnnnnnnnnnnnnnnnnnnnnnnnnnnnnnnnnnnnnnnnnnnnnnnnnnnnnnnnnnnnnnnnnnnnnnnnnnnnnnnnnnnnnnnnnnnnnnnnnnnnnnnnnnnnnnnnnnnnnnnnnnnnnnnnnnnnnnnnnnnnnnnnnnnnnnnnnnnnnnnnnnnnnnnnnnnnnnnnnnnnnnnnnnnnnnnnnnnnnnnnnnnnnnnnnnnnnnnnnnnnnnnnnnnnnnnnnnnnnnnnnnnnnnnnnnnnnnnnnnnnnnnnnnnnnnnnnnnnnnnnnnnnnnnnnnnnnnnnnnnnnnnnnnnnnnnnnnnnnnnnnnnnnnnnnnnnnnnnnnnnnnnnnnnnnnnnnnnnnnnnnnnnnnnnnnnnnnnnnnnnnnnnnnnnnnnnnnnnnnnnnnnnnnnnnnnnnnnnnnnnnnnnnnnnnnnnnnnnnnnnnnnnnnnnnnnnnnnnnnnnnnnnnnnnnnnnnnnnnnnnnnnnnnnnnnnnnnnnnnnnnnnnnnnnnnnnnnnnnnnnnnnnnnnnnnnnnnnnnnnnnnnnnnnnnnnnnnnnnnnnnnnnnnnnnnnnnnnnnnnnnnnnnnnnnnnnnnnnnnnnnnnnnnnnnnnnnnnnnnnnnnnnnnnnnnnnnnnnnnnnnnnnnnnnnnnnnnnnnnnnnnnnnnnnnnnnnnnnnnnnnnnnnnnnnnnnnnnnnnnnnnnnnnnnnnnnnnnnnnnnnnnnnnnnnnnnnnnnnnnnnnnnnnnnnnnnnnnnnnnnnnnnnnnnnnnnnnnnnnnnnnnnnnnnnnnnnnnnnnnnnnnnnnnnnnnnnnnnnnnnnnnnnnnnnnnnnnnnnnnnnnnnnnnnnnnnnnnnnnnnnnnnnnnnnnnnnnnnnnnnnnnnnnnnnnnnnnnnnnnnnnnnnnnnnnnnnnnnnnnnnnnnnnnnnnnnnnnnnnnnnnnnnnnnnnnnnnnnnnnnnnnnnnnnnnnnnnnnnnnnnnnnnnnnnnnnnnnnnnnnnnnnnnnnnnnnnnnnnnnnnnnnnnnnnnnnnnnnnnnnnnnnnnnnnnnnnnnnnnnnnnnnnnnnnnnnnnnnnnnnnnnnnnnnnnnnnnnnnnnnnnnnnnnnnnnnnnnnnnnnnnnnnnnnnnnnnnnnnnnnnnnnnnnnnnnnnnnnnnnnnnnnnnnnnnnnnnnnnnnnnnnnnnnnnnnnnnnnnnnnnnnnnnnnnnnnnnnnnnnnnnnnnnnnnnnnnnnnnnnnnnnnnnnnnnnnnnnnnnnnnnnnnnnnnnnnnnnnnnnnnnnnnnnnnnnnnnnnnnnnnnnnnnnnnnnnnnnnnnnnnnnnnnnnnnnnnnnnnnnnnnnnnnnnnnnnnnnnnnnnnnnnnnnnnnnnnnnnnnnnnnnnnnnnnnnnnnnnnnnnnnnnnnnnnnnnnnnnnnnnnnnnnnnnnnnnnnnnnnnnnnnnnnnnnnnnnnnnnnnnnnnnnnnnnnnnnnnnnnnnnnnnnnnnnnnnnnnnnnnnnnnnnnnnnnnnnnnnnnnnnnnnnnnnnnnnnnnnnnnnnnnnnnnnnnnnnnnnnnnnnnnnnnnnnnnnnnnnnnnnnnnnnnnnnnnnnnnnnnnnnnnnnnnnnnnnnnnnnnnnnnnnnnnnnnnnnnnnnnnnnnnnnnnnnnnnnnnnnnnnnnnnnnnnnnnnnnnnnnnnnnnnnnnnnnnnnnnnnnnnnnnnnnnnnnnnnnnnnnnnnnnnnnnnnnnnnnnnnnnnnnnnnnnnnnnnnnnnnnnnnnnnnnnnnnnnnnnnnnnnnnnnnnnnnnnnnnnnnnnnnnnnnnnnnnnnnnnnnnnnnnnnnnnnnnnnnnnnnnnnnnnnnnnnnnnnnnnnnnnnnnnnnnnnnnnnnnnnnnnnnnnnnnnnnnnnnnnnnnnnnnnnnnnnnnnnnnnnnnnnnnnnnnnnnnnnnnnnnnnnnnnnnnnnnnnnnnnnnnnnnnnnnnnnnnnnnnnnnnnnnnnnnnnnnnnnnnnnnnnnnnnnnnnnnnnnnnnnnnnnnnnnnnnnnnnnnnnnnnnnnnnnnnnnnnnnnnnnnnnnnnnnnnnnnnnnnnnnnnnnnnnnnnnnnnnnnnnnnnnnnnnnnnnnnnnnnnnnnnnnnnnnnnnnnnnnnnnnnnnnnnnnnnnnnnnnnnnnnnnnnnnnnnnnnnnnnnnnnnnnnnnnnnnnnnnnnnnnnnnnnnnnnnnnnnnnnnnnnnnnnnnnnnnnnnnnnnnnnnnnnnnnnnnnnnnnnnnnnnnnnnnnnnnnnnnnnnnnnnnnnnnnnnnnnnnnnnnnnnnnnnnnnnnnnnnnnnnnnnnnnnnnnnnnnnnnnnnnnnnnnnnnnnnnnnnnnnnnnnnnnnnnnnnnnnnnnnnnnnnnnnnnnnnnnnnnnnnnnnnnnnnnnnnnnnnnnnnnnnnnnnnnnnnnnnnnnnnnnnnnnnnnnnnnnnnnnnnnnnnnnnnnnnnnnnnnnnnnnnnnnnnnnnnnnnnnnnnnnnnnnnnnnnnnnnnnnnnnnnnnnnnnnnnnnnnnnnnnnnnnnnnnnnnnnnnnnnnnnnnnnnnnnnnnnnnnnnnnnnnnnnnnnnnnnnnnnnnnnnnnnnnnnnnnnnnnnnnnnnnnnnnnnnnnnnnnnnnnnnnnnnnnnnnnnnnnnnnnnnnnnnnnnnnnnnnnnnnnnnnnnnnnnnnnnnnnnnnnnnnnnnnnnnnnnnnnnnnnnnnnnnnnnnnnnnnnnnnnnnnnnnnnnnnnnnnnnnnnnnnnnnnnnnnnnnnnnnnnnnnnnnnnnnnnnnnnnnnnnnnnnnnnnnnnnnnnnnnnnnnnnnnnnnnnnnnnnnnnnnnnnnnnnnnnnnnnnnnnnnnnnnnnnnnnnnnnnnnnnnnnnnnnnnnnnnnnnnnnnnnnnnnnnnnnnnnnnnnnnnnnnnnnnnnnnnnnnnnnnnnnnnnnnnnnnnnnnnnnnnnnnnnnnnnnnnnnnnnnnnnnnnnnnnnnnnnnnnnnnnnnnnnnnnnnnnnnnnnnnnnnnnnnnnnnnnnnnnnnnnnnnnnnnnnnnnnnnnnnnnnnnnnnnnnnnnnnnnnnnnnnnnnnnnnnnnnnnnnnnnnnnnnnnnnnnnnnnnnnnnnnnnnnnnnnnnnnnnnnnnnnnnnnnnnnnnnnnnnnnnnnnnnnnnnnnnnnnnnnnnnnnnnnnnnnnnnnnnnnnnnnnnnnnnnnnnnnnnnnnnnnnnnnnnnnnnnnnnnnnnnnnnnnnnnnnnnnnnnnnnnnnnnnnnnnnnnnnnnnnnnnnnnnnnnnnnnnnnnnnnnnnnnnnnnnnnnnnnnnnnnnnnnnnnnnnnnnnnnnnnnnnnnnnnnnnnnnnnnnnnnnnnnnnnnnnnnnnnnnnnnnnnnnnnnnnnnnnnnnnnnnnnnnnnnnnnnnnnnnnnnnnnnnnnnnnnnnnnnnnnnnnnnnnnnnnnnnnnnnnnnnnnnnnnnnnnnnnnnnnnnnnnnnnnnnnnnnnnnnnnnnnnnnnnnnnnnnnnnnnnnnnnnnnnnnnnnnnnnnnnnnnnnnnnnnnnnnnnnnnnnnnnnnnnnnnnnnnnnnnnnnnnnnnnnnnnnnnnnnnnnnnnnnnnnnnnnnnnnnnnnnnnnnnnnnnnnnnnnnnnnnnnnnnnnnnnnnnnnnnnnnnnnnnnnnnnnnnnnnnnnnnnnnnnnnnnnnnnnnnnnnnnnnnnnnnnnnnnnnnnnnnnnnnnnnnnnnnnnnnnnnnnnnnnnnnnnnnnnnnnnnnnnnnnnnnnnnnnnnnnnnnnnnnnnnnnnnnnnnnnnnnnnnnnnnnnnnnnnnnnnnnnnnnnnnnnnnnnnnnnnnnnnnnnnnnnnnnnnnnnnnnnnnnnnnnnnnnnnnnnnnnnnnnnnnnnnnnnnnnnnnnnnnnnnnnnnnnnnnnnnnnnnnnnnnnnnnnnnnnnnnnnnnnnnnnnnnnnnnnnnnnnnnnnnnnnnnnnnnnnnnnnnnnnnnnnnnnnnnnnnnnnnnnnnnnnnnnnnnnnnnnnnnnnnnnnnnnnnnnnnnnnnnnnnnnnnnnnnnnnnnnnnnnnnnnnnnnnnnnnnnnnnnnnnnnnnnnnnnnnnnnnnnnnnnnnnnnnnnnnnnnnnnnnnnnnnnnnnnnnnnnnnnnnnnnnnnnnnnnnnnnnnnnnnnnnnnnnnnnnnnnnnnnnnnnnnnnnnnnnnnnnnnnnnnnnnnnnnnnnnnnnnnnnnnnnnnnnnnnnnnnnnnnnnnnnnnnnnnnnnnnnnnnnnnnnnnnnnnnnnnnnnnnnnnnnnnnnnnnnnnnnnnnnnnnnnnnnnnnnnnnnnnnnnnnnnnnnnnnnnnnnnnnnnnnnnnnnnnnnnnnnnnnnnnnnnnnnnnnnnnnnnnnnnnnnnnnnnnnnnnnnnnnnnnnnnnnnnnnnnnnnnnnnnnnnnnnnnnnnnnnnnnnnnnnnnnnnnnnnnnnnnnnnnnnnnnnnnnnnnnnnnnnnnnnnnnnnnnnnnnnnnnnnnnnnnnnnnnnnnnnnnnnnnnnnnnnnnnnnnnnnnnnnnnnnnnnnnnnnnnnnnnnnnnnnnnnnnnnnnnnnnnnnnnnnnnnnnnnnnnnnnnnnnnnnnnnnnnnnnnnnnnnnnnnnnnnnnnnnnnnnnnnnnnnnnnnnnnnnnnnnnnnnnnnnnnnnnnnnnnnnnnnnnnnnnnnnnnnnnnnnnnnnnnnnnnnnnnnnnnnnnnnnnnnnnnnnnnnnnnnnnnnnnnnnnnnnnnnnnnnnnnnnnnnnnnnnnnnnnnnnnnnnnnnnnnnnnnnnnnnnnnnnnnnnnnnnnnnnnnnnnnnnnnnnnnnnnnnnnnnnnnnnnnnnnnnnnnnnnnnnnnnnnnnnnnnnnnnnnnnnnnnnnnnnnnnnnnnnnnnnnnnnnnnnnnnnnnnnnnnnnnnnnnnnnnnnnnnnnnnnnnnnnnnnnnnnnnnnnnnnnnnnnnnnnnnnnnnnnnnnnnnnnnnnnnnnnnnnnnnnnnnnnnnnnnnnnnnnnnnnnnnnnnnnnnnnnnnnnnnnnnnnnnnnnnnnnnnnnnnnnnnnnnnnnnnnnnnnnnnnnnnnnnnnnnnnnnnnnnnnnnnnnnnnnnnnnnnnnnnnnnnnnnnnnnnnnnnnnnnnnnnnnnnnnnnnnnnnnnnnnnnnnnnnnnnnnnnnnnnnnnnnnnnnnnnnnnnnnnnnnnnnnnnnnnnnnnnnnnnnnnnnnnnnnnnnnnnnnnnnnnnnnnnnnnnnnnnnnnnnnnnnnnnnnnnnnnnnnnnnnnnnnnnnnnnnnnnnnnnnnnnnnnnnnnnnnnnnnnnnnnnnnnnnnnnnnnnnnnnnnnnnnnnnnnnnnnnnnnnnnnnnnnnnnnnnnnnnnnnnnnnnnnnnnnnnnnnnnnnnnnnnnnnnnnnnnnnnnnnnnnnnnnnnnnnnnnnnnnnnnnnnnnnnnnnnnnnnnnnnnnnnnnnnnnnnnnnnnnnnnnnnnnnnnnnnnnnnnnnnnnnnnnnnnnnnnnnnnnnnnnnnnnnnnnnnnnnnnnnnnnnnnnnnnnnnnnnnnnnnnnnnnnnnnnnnnnnnnnnnnnnnnnnnnnnnnnnnnnnnnnnnnnnnnnnnnnnnnnnnnnnnnnnnnnnnnnnnnnnnnnnnnnnnnnnnnnnnnnnnnnnnnnnnnnnnnnnnnnnnnnnnnnnnnnnnnnnnnnnnnnnnnnnnnnnnnnnnnnnnnnnnnnnnnnnnnnnnnnnnnnnnnnnnnnnnnnnnnnnnnnnnnnnnnnnnnnnnnnnnnnnnnnnnnnnnnnnnnnnnnnnnnnnnnnnnnnnnnnnnnnnnnnnnnnnnnnnnnnnnnnnnnnnnnnnnnnnnnnnnnnnnnnnnnnnnnnnnnnnnnnnnnnnnnnnnnnnnnnnnnnnnnnnnnnnnnnnnnnnnnnnnnnnnnnnnnnnnnnnnnnnnnnnnnnnnnnnnnnnnnnnnnnnnnnnnnnnnnnnnnnnnnnnnnnnnnnnnnnnnnnnnnnnnnnnnnnnnnnnnnnnnnnnnnnnnnnnnnnnnnnnnnnnnnnnnnnnnnnnnnnnnnnnnnnnnnnnnnnnnnnnnnnnnnnnnnnnnnnnnnnnnnnnnnnnnnnnnnnnnnnnnnnnnnnnnnnnnnnnnnnnnnnnnnnnnnnnnnnnnnnnnnnnnnnnnnnnnnnnnnnnnnnnnnnnnnnnnnnnnnnnnnnnnnnnnnnnnnnnnnnnnnnnnnnnnnnnnnnnnnnnnnnnnnnnnnnnnnnnnnnnnnnnnnnnnnnnnnnnnnnnnnnnnnnnnnnnnnnnnnnnnnnnnnnnnnnnnnnnnnnnnnnnnnnnnnnnnnnnnnnnnnnnnnnnnnnnnnnnnnnnnnnnnnnnnnnnnnnnnnnnnnnnnnnnnnnnnnnnnnnnnnnnnnnnnnnnnnnnnnnnnnnnnnnnnnnnnnnnnnnnnnnnnnnnnnnnnnnnnnnnnnnnnnnnnnnnnnnnnnnnnnnnnnnnnnnnnnnnnnnnnnnnnnnnnnnnnnnnnnnnnnnnnnnnnnnnnnnnnnnnnnnnnnnnnnnnnnnnnnnnnnnnnnnnnnnnnnnnnnnnnnnnnnnnnnnnnnnnnnnnnnnnnnnnnnnnnnnnnnnnnnnnnnnnnnnnnnnnnnnnnnnnnnnnnnnnnnnnnnnnnnnnnnnnnnnnnnnnnnnnnnnnnnnnnnnnnnnnnnnnnnnnnnnnnnnnnnnnnnnnnnnnnnnnnnnnnnnnnnnnnnnnnnnnnnnnnnnnnnnnnnnnnnnnnnnnnnnnnnnnnnnnnnnnnnnnnnnnnnnnnnnnnnnnnnnnnnnnnnnnnnnnnnnnnnnnnnnnnnnnnnnnnnnnnnnnnnnnnnnnnnnnnnnnnnnnnnnnnnnnnnnnnnnnnnnnnnnnnnnnnnnnnnnnnnnnnnnnnnnnnnnnnnnnnnnnnnnnnnnnnnnnnnnnnnnnnnnnnnnnnnnnnnnnnnnnnnnnnnnnnnnnnnnnnnnnnnnnnnnnnnnnnnnnnnnnnnnnnnnnnnnnnnnnnnnnnnnnnnnnnnnnnnnnnnnnnnnnnnnnnnnnnnnnnnnnnnnnnnnnnnnnnnnnnnnnnnnnnnnnnnnnnnnnnnnnnnnnnnnnnnnnnnnnnnnnnnnnnnnnnnnnnnnnnnnnnnnnnnnnnnnnnnnnnnnnnnnnnnnnnnnnnnnnnnnnnnnnnnnnnnnnnnnnnnnnnnnnnnnnnnnnnnnnnnnnnnnnnnnnnnnnnnnnnnnnnnnnnnnnnnnnnnnnnnnnnnnnnnnnnnnnnnnnnnnnnnnnnnnnnnnnnnnnnnnnnnnnnnnnnnnnnnnnnnnnnnnnnnnnnnnnnnnnnnnnnnnnnnnnnnnnnnnnnnnnnnnnnnnnnnnnnnnnnnnnnnnnnnnnnnnnnnnnnnnnnnnnnnnnnnnnnnnnnnnnnnnnnnnnnnnnnnnnnnnnnnnnnnnnnnnnnnnnnnnnnnnnnnnnnnnnnnnnnnnnnnnnnnnnnnnnnnnnnnnnnnnnnnnnnnnnnnnnnnnnnnnnnnnnnnnnnnnnnnnnnnnnnnnnnnnnnnnnnnnnnnnnnnnnnnnnnnnnnnnnnnnnnnnnnnnnnnnnnnnnnnnnnnnnnnnnnnnnnnnnnnnnnnnnnnnnnnnnnnnnnnnnnnnnnnnnnnnnnnnnnnnnnnnnnnnnnnnnnnnnnnnnnnnnnnnnnnnnnnnnnnnnnnnnnnnnnnnnnnnnnnnnnnnnnnnnnnnnnnnnnnnnnnnnnnnnnnnnnnnnnnnnnnnnnnnnnnnnnnnnnnnnnnnnnnnnnnnnnnnnnnnnnnnnnnnnnnnnnnnnnnnnnnnnnnnnnnnnnnnnnnnnnnnnnnnnnnnnnnnnnnnnnnnnnnnnnnnnnnnnnnnnnnnnnnnnnnnnnnnnnnnnnnnnnnnnnnnnnnnnnnnnnnnnnnnnnnnnnnnnnnnnnnnnnnnnnnnnnnnnnnnnnnnnnnnnnnnnnnnnnnnnnnnnnnnnnnnnnnnnnnnnnnnnnnnnnnnnnnnnnnnnnnnnnnnnnnnnnnnnnnnnnnnnnnnnnnnnnnnnnnnnnnnnnnnnnnnnnnnnnnnnnnnnnnnnnnnnnnnnnnnnnnnnnnnnnnnnnnnnnnnnnnnnnnnnnnnnnnnnnnnnnnnnnnnnnnnnnnnnnnnnnnnnnnnnnnnnnnnnnnnnnnnnnnnnnnnnnnnnnnnnnnnnnnnnnnnnnnnnnnnnnnnnnnnnnnnnnnnnnnnnnnnnnnnnnnnnnnnnnnnnnnnnnnnnnnnnnnnnnnnnnnnnnnnnnnnnnnnnnnnnnnnnnnnnnnnnnnnnnnnnnnnnnnnnnnnnnnnnnnnnnnnnnnnnnnnnnnnnnnnnnnnnnnnnnnnnnnnnnnnnnnnnnnnnnnnnnnnnnnnnnnnnnnnnnnnnnnnnnnnnnnnnnnnnnnnnnnnnnnnnnnnnnnnnnnnnnnnnnnnnnnnnnnnnnnnnnnnnnnnnnnnnnnnnnnnnnnnnnnnnnnnnnnnnnnnnnnnnnnnnnnnnnnnnnnnnnnnnnnnnnnnnnnnnnnnnnnnnnnnnnnnnnnnnnnnnnnnnnnnnnnnnnnnnnnnnnnnnnnnnnnnnnnnnnnnnnnnnnnnnnnnnnnnnnnnnnnnnnnnnnnnnnnnnnnnnnnnnnnnnnnnnnnnnnnnnnnnnnnnnnnnnnnnnnnnnnnnnnnnnnnnnnnnnnnnnnnnnnnnnnnnnnnnnnnnnnnnnnnnnnnnnnnnnnnnnnnnnnnnnnnnnnnnnnnnnnnnnnnnnnnnnnnnnnnnnnnnnnnnnnnnnnnnnnnnnnnnnnnnnnnnnnnnnnnnnnnnnnnnnnnnnnnnnnnnnnnnnnnnnnnnnnnnnnnnnnnnnnnnnnnnnnnnnnnnnnnnnnnnnnnnnnnnnnnnnnnnnnnnnnnnnnnnnnnnnnnnnnnnnnnnnnnnnnnnnnnnnnnnnnnnnnnnnnnnnnnnnnnnnnnnnnnnnnnnnnnnnnnnnnnnnnnnnnnnnnnnnnnnnnnnnnnnnnnnnnnnnnnnnnnnnnnnnnnnnnnnnnnnnnnnnnnnnnnnnnnnnnnnnnnnnnnnnnnnnnnnnnnnnnnnnnnnnnnnnnnnnnnnnnnnnnnnnnnnnnnnnnnnnnnnnnnnnnnnnnnnnnnnnnnnnnnnnnnnnnnnnnnnnnnnnnnnnnnnnnnnnnnnnnnnnnnnnnnnnnnnnnnnnnnnnnnnnnnnnnnnnnnnnnnnnnnnnnnnnnnnnnnnnnnnnnnnnnnnnnnnnnnnnnnnnnnnnnnnnnnnnnnnnnnnnnnnnnnnnnnnnnnnnnnnnnnnnnnnnnnnnnnnnnnnnnnnnnnnnnnnnnnnnnnnnnnnnnnnnnnnnnnnnnnnnnnnnnnnnnnnnnnnnnnnnnnnnnnnnnnnnnnnnnnnnnnnnnnnnnnnnnnnnnnnnnnnnnnnnnnnnnnnnnnnnnnnnnnnnnnnnnnnnnnnnnnnnnnnnnnnnnnnnnnnnnnnnnnnnnnnnnnnnnnnnnnnnnnnnnnnnnnnnnnnnnnnnnnnnnnnnnnnnnnnnnnnnnnnnnnnnnnnnnnnnnnnnnnnnnnnnnnnnnnnnnnnnnnnnnnnnnnnnnnnnnnnnnnnnnnnnnnnnnnnnnnnnnnnnnnnnnnnnnnnnnnnnnnnnnnnnnnnnnnnnnnnnnnnnnnnnnnnnnnnnnnnnnnnnnnnnnnnnnnnnnnnnnnnnnnnnnnnnnnnnnnnnnnnnnnnnnnnnnnnnnnnnnnnnnnnnnnnnnnnnnnnnnnnnnnnnnnnnnnnnnnnnnnnnnnnnnnnnnnnnnnnnnnnnnnnnnnnnnnnnnnnnnnnnnnnnnnnnnnnnnnnnnnnnnnnnnnnnnnnnnnnnnnnnnnnnnnnnnnnnnnnnnnnnnnnnnnnnnnnnnnnnnnnnnnnnnnnnnnnnnnnnnnnnnnnnnnnnnnnnnnnnnnnnnnnnnnnnnnnnnnnnnnnnnnnnnnnnnnnnnnnnnnnnnnnnnnnnnnnnnnnnnnnnnnnnnnnnnnnnnnnnnnnnnnnnnnnnnnnnnnnnnnnnnnnnnnnnnnnnnnnnnnnnnnnnnnnnnnnnnnnnnnnnnnnnnnnnnnnnnnnnnnnnnnnnnnnnnnnnnnnnnnnnnnnnnnnnnnnnnnnnnnnnnnnnnnnnnnnnnnnnnnnnnnnnnnnnnnnnnnnnnnnnnnnnnnnnnnnnnnnnnnnnnnnnnnnnnnnnnnnnnnnnnnnnnnnnnnnnnnnnnnnnnnnnnnnnnnnnnnnnnnnnnnnnnnnnnnnnnnnnnnnnnnnnnnnnnnnnnnnnnnnnnnnnnnnnnnnnnnnnnnnnnnnnnnnnnnnnnnnnnnnnnnnnnnnnnnnnnnnnnnnnnnnnnnnnnnnnnnnnnnnnnnnnnnnnnnnnnnnnnnnnnnnnnnnnnnnnnnnnnnnnnnnnnnnnnnnnnnnnnnnnnnnnnnnnnnnnnnnnnnnnnnnnnnnnnnnnnnnnnnnnnnnnnnnnnnnnnnnnnnnnnnnnnnnnnnnnnnnnnnnnnnnnnnnnnnnnnnnnnnnnnnnnnnnnnnnnnnnnnnnnnnnnnnnnnnnnnnnnnnnnnnnnnnnnnnnnnnnnnnnnnnnnnnnnnnnnnnnnnnnnnnnnnnnnnnnnnnnnnnnnnnnnnnnnnnnnnnnnnnnnnnnnnnnnnnnnnnnnnnnnnnnnnnnnnnnnnnnnnnnnnnnnnnnnnnnnnnnnnnnnnnnnnnnnnnnnnnnnnnnnnnnnnnnnnnnnnnnnnnnnnnnnnnnnnnnnnnnnnnnnnnnnnnnnnnnnnnnnnnnnnnnnnnnnnnnnnnnnnnnnnnnnnnnnnnnnnnnnnnnnnnnnnnnnnnnnnnnnnnnnnnnnnnnnnnnnnnnnnnnnnnnnnnnnnnnnnnnnnnnnnnnnnnnnnnnnnnnnnnnnnnnnnnnnnnnnnnnnnnnnnnnnnnnnnnnnnnnnnnnnnnnnnnnnnnnnnnnnnnnnnnnnnnnnnnnnnnnnnnnnnnnnnnnnnnnnnnnnnnnnnnnnnnnnnnnnnnnnnnnnnnnnnnnnnnnnnnnnnnnnnnnnnnnnnnnnnnnnnnnnnnnnnnnnnnnnnnnnnnnnnnnnnnnnnnnnnnnnnnnnnnnnnnnnnnnnnnnnnnnnnnnnnnnnnnnnnnnnnnnnnnnnnnnnnnnnnnnnnnnnnnnnnnnnnnnnnnnnnnnnnnnnnnnnnnnnnnnnnnnnnnnnnnnnnnnnnnnnnnnnnnnnnnnnnnnnnnnnnnnnnnnnnnnnnnnnnnnnnnnnnnnnnnnnnnnnnnnnnnnnnnnnnnnnnnnnnnnnnnnnnnnnnnnnnnnnnnnnnnnnnnnnnnnnnnnnnnnnnnnnnnnnnnnnnnnnnnnnnnnnnnnnnnnnnnnnnnnnnnnnnnnnnnnnnnnnnnnnnnnnnnnnnnnnnnnnnnnnnnnnnnnnnnnnnnnnnnnnnnnnnnnnnnnnnnnnnnnnnnnnnnnnnnnnnnnnnnnnnnnnnnnnnnnnnnnnnnnnnnnnnnnnnnnnnnnnnnnnnnnnnnnnnnnnnnnnnnnnnnnnnnnnnnnnnnnnnnnnnnnnnnnnnnnnnnnnnnnnnnnnnnnnnnnnnnnnnnnnnnnnnnnnnnnnnnnnnnnnnnnnnnnnnnnnnnnnnnnnnnnnnnnnnnnnnnnnnnnnnnnnnnnnnnnnnnnnnnnnnnnnnnnnnnnnnnnnnnnnnnnnnnnnnnnnnnnnnnnnnnnnnnnnnnnnnnnnnnnnnnnnnnnnnnnnnnnnnnnnnnnnnnnnnnnnnnnnnnnnnnnnnnnnnnnnnnnnnnnnnnnnnnnnnnnnnnnnnnnnnnnnnnnnnnnnnnnnnnnnnnnnnnnnnnnnnnnnnnnnnnnnnnnnnnnnnnnnnnnnnnnnnnnnnnnnnnnnnnnnnnnnnnnnnnnnnnnnnnnnnnnnnnnnnnnnnnnnnnnnnnnnnnnnnnnnnnnnnnnnnnnnnnnnnnnnnnnnnnnnnnnnnnnnnnnnnnnnnnnnnnnnnnnnnnnnnnnnnnnnnnnnnnnnnnnnnnnnnnnnnnnnnnnnnnnnnnnnnnnnnnnnnnnnnnnnnnnnnnnnnnnnnnnnnnnnnnnnnnnnnnnnnnnnnnnnnnnnnnnnnnnnnnnnnnnnnnnnnnnnnnnnnnnnnnnnnnnnnnnnnnnnnnnnnnnnnnnnnnnnnnnnnnnnnnnnnnnnnnnnnnnnnnnnnnnnnnnnnnnnnnnnnnnnnnnnnnnnnnnnnnnnnnnnnnnnnnnnnnnnnnnnnnnnnnnnnnnnnnnnnnnnnnnnnnnnnnnnnnnnnnnnnnnnnnnnnnnnnnnnnnnnnnnnnnnnnnnnnnnnnnnnnnnnnnnnnnnnnnnnnnnnnnnnnnnnnnnnnnnnnnnnnnnnnnnnnnnnnnnnnnnnnnnnnnnnnnnnnnnnnnnnnnnnnnnnnnnnnnnnnnnnnnnnnnnnnnnnnnnnnnnnnnnnnnnnnnnnnnnnnnnnnnnnnnnnnnnnnnnnnnnnnnnnnnnnnnnnnnnnnnnnnnnnnnnnnnnnnnnnnnnnnnnnnnnnnnnnnnnnnnnnnnnnnnnnnnnnnnnnnnnnnnnnnnnnnnnnnnnnnnnnnnnnnnnnnnnnnnnnnnnnnnnnnnnnnnnnnnnnnnnnnnnnnnnnnnnnnnnnnnnnnnnnnnnnnnnnnnnnnnnnnnnnnnnnnnnnnnnnnnnnnnnnnnnnnnnnnnnnnnnnnnnnnnnnnnnnnnnnnnnnnnnnnnnnnnnnnnnnnnnnnnnnnnnnnnnnnnnnnnnnnnnnnnnnnnnnnnnnnnnnnnnnnnnnnnnnnnnnnnnnnnnnnnnnnnnnnnnnnnnnnnnnnnnnnnnnnnnnnnnnnnnnnnnnnnnnnnnnnnnnnnnnnnnnnnnnnnnnnnnnnnnnnnnnnnnnnnnnnnnnnnnnnnnnnnnnnnnnnnnnnnnnnnnnnnnnnnnnnnnnnnnnnnnnnnnnnnnnnnnnnnnnnnnnnnnnnnnnnnnnnnnnnnnnnnnnnnnnnnnnnnnnnnnnnnnnnnnnnnnnnnnnnnnnnnnnnnnnnnnnnnnnnnnnnnnnnnnnnnnnnnnnnnnnnnnnnnnnnnnnnnnnnnnnnnnnnnnnnnnnnnnnnnnnnnnnnnnnnnnnnnnnnnnnnnnnnnnnnnnnnnnnnnnnnnnnnnnnnnnnnnnnnnnnnnnnnnnnnnnnnnnnnnnnnnnnnnnnnnnnnnnnnnnnnnnnnnnnnnnnnnnnnnnnnnnnnnnnnnnnnnnnnnnnnnnnnnnnnnnnnnnnnnnnnnnnnnnnnnnnnnnnnnnnnnnnnnnnnnnnnnnnnnnnnnnnnnnnnnnnnnnnnnnnnnnnnnnnnnnnnnnnnnnnnnnnnnnnnnnnnnnnnnnnnnnnnnnnnnnnnnnnnnnnnnnnnnnnnnnnnnnnnnnnnnnnnnnnnnnnnnnnnnnnnnnnnnnnnnnnnnnnnnnnnnnnnnnnnnnnnnnnnnnnnnnnnnnnnnnnnnnnnnnnnnnnnnnnnnnnnnnnnnnnnnnnnnnnnnnnnnnnnnnnnnnnnnnnnnnnnnnnnnnnnnnnnnnnnnnnnnnnnnnnnnnnnnnnnnnnnnnnnnnnnnnnnnnnnnnnnnnnnnnnnnnnnnnnnnnnnnnnnnnnnnnnnnnnnnnnnnnnnnnnnnnnnnnnnnnnnnnnnnnnnnnnnnnnnnnnnnnnnnnnnnnnnnnnnnnnnnnnnnnnnnnnnnnnnnnnnnnnnnnnnnnnnnnnnnnnnnnnnnnnnnnnnnnnnnnnnnnnnnnnnnnnnnnnnnnnnnnnnnnnnnnnnnnnnnnnnnnnnnnnnnnnnnnnnnnnnnnnnnnnnnnnnnnnnnnnnnnnnnnnnnnnnnnnnnnnnnnnnnnnnnnnnnnnnnnnnnnnnnnnnnnnnnnnnnnnnnnnnnnnnnnnnnnnnnnnnnnnnnnnnnnnnnnnnnnnnnnnnnnnnnnnnnnnnnnnnnnnnnnnnnnnnnnnnnnnnnnnnnnnnnnnnnnnnnnnnnnnnnnnnnnnnnnnnnnnnnnnnnnnnnnnnnnnnnnnnnnnnnnnnnnnnnnnnnnnnnnnnnnnnnnnnnnnnnnnnnnnnnnnnnnnnnnnnnnnnnnnnnnnnnnnnnnnnnnnnnnnnnnnnnnnnnnnnnnnnnnnnnnnnnnnnnnnnnnnnnnnnnnnnnnnnnnnnnnnnnnnnnnnnnnnnnnnnnnnnnnnnnnnnnnnnnnnnnnnnnnnnnnnnnnnnnnnnnnnnnnnnnnnnnnnnnnnnnnnnnnnnnnnnnnnnnnnnnnnnnnnnnnnnnnnnnnnnnnnnnnnnnnnnnnnnnnnnnnnnnnnnnnnnnnnnnnnnnnnnnnnnnnnnnnnnnnnnnnnnnnnnnnnnnnnnnnnnnnnnnnnnnnnnnnnnnnnnnnnnnnnnnnnnnnnnnnnnnnnnnnnnnnnnnnnnnnnnnnnnnnnnnnnnnnnnnnnnnnnnnnnnnnnnnnnnnnnnnnnnnnnnnnnnnnnnnnnnnnnnnnnnnnnnnnnnnnnnnnnnnnnnnnnnnnnnnnnnnnnnnnnnnnnnnnnnnnnnnnnnnnnnnnnnnnnnnnnnnnnnnnnnnnnnnnnnnnnnnnnnnnnnnnnnnnnnnnnnnnnnnnnnnnnnnnnnnnnnnnnnnnnnnnnnnnnnnnnnnnnnnnnnnnnnnnnnnnnnnnnnnnnnnnnnnnnnnnnnnnnnnnnnnnnnnnnnnnnnnnnnnnnnnnnnnnnnnnnnnnnnnnnnnnnnnnnnnnnnnnnnnnnnnnnnnnnnnnnnnnnnnnnnnnnnnnnnnnnnnnnnnnnnnnnnnnnnnnnnnnnnnnnnnnnnnnnnnnnnnnnnnnnnnnnnnnnnnnnnnnnnnnnnnnnnnnnnnnnnnnnnnnnnnnnnnnnnnnnnnnnnnnnnnnnnnnnnnnnnnnnnnnnnnnnnnnnnnnnnnnnnnnnnnnnnnnnnnnnnnnnnnnnnnnnnnnnnnnnnnnnnnnnnnnnnnnnnnnnnnnnnnnnnnnnnnnnnnnnnnnnnnnnnnnnnnnnnnnnnnnnnnnnnnnnnnnnnnnnnnnnnnnnnnnnnnnnnnnnnnnnnnnnnnnnnnnnnnnnnnnnnnnnnnnnnnnnnnnnnnnnnnnnnnnnnnnnnnnnnnnnnnnnnnnnnnnnnnnnnnnnnnnnnnnnnnnnnnnnnnnnnnnnnnnnnnnnnnnnnnnnnnnnnnnnnnnnnnnnnnnnnnnnnnnnnnnnnnnnnnnnnnnnnnnnnnnnnnnnnnnnnnnnnnnnnnnnnnnnnnnnnnnnnnnnnnnnnnnnnnnnnnnnnnnnnnnnnnnnnnnnnnnnnnnnnnnnnnnnnnnnnnnnnnnnnnnnnnnnnnnnnnnnnnnnnnnnnnnnnnnnnnnnnnnnnnnnnnnnnnnnnnnnnnnnnnnnnnnnnnnnnnnnnnnnnnnnnnnnnnnnnnnnnnnnnnnnnnnnnnnnnnnnnnnnnnnnnnnnnnnnnnnnnnnnnnnnnnnnnnnnnnnnnnnnnnnnnnnnnnnnnnnnnnnnnnnnnnnnnnnnnnnnnnnnnnnnnnnnnnnnnnnnnnnnnnnnnnnnnnnnnnnnnnnnnnnnnnnnnnnnnnnnnnnnnnnnnnnnnnnnnnnnnnnnnnnnnnnnnnnnnnnnnnnnnnnnnnnnnnnnnnnnnnnnnnnnnnnnnnnnnnnnnnnnnnnnnnnnnnnnnnnnnnnnnnnnnnnnnnnnnnnnnnnnnnnnnnnnnnnnnnnnnnnnnnnnnnnnnnnnnnnnnnnnnnnnnnnnnnnnnnnnnnnnnnnnnnnnnnnnnnnnnnnnnnnnnnnnnnnnnnnnnnnnnnnnnnnnnnnnnnnnnnnnnnnnnnnnnnnnnnnnnnnnnnnnnnnnnnnnnnnnnnnnnnnnnnnnnnnnnnnnnnnnnnnnnnnnnnnnnnnnnnnnnnnnnnnnnnnnnnnnnnnnnnnnnnnnnnnnnnnnnnnnnnnnnnnnnnnnnnnnnnnnnnnnnnnnnnnnnnnnnnnnnnnnnnnnnnnnnnnnnnnnnnnnnnnnnnnnnnnnnnnnnnnnnnnnnnnnnnnnnnnnnnnnnnnnnnnnnnnnnnnnnnnnnnnnnnnnnnnnnnnnnnnnnnnnnnnnnnnnnnnnnnnnnnnnnnnnnnnnnnnnnnnnnnnnnnnnnnnnnnnnnnnnnnnnnnnnnnnnnnnnnnnnnnnnnnnnnnnnnnnnnnnnnnnnnnnnnnnnnnnnnnnnnnnnnnnnnnnnnnnnnnnnnnnnnnnnnnnnnnnnnnnnnnnnnnnnnnnnnnnnnnnnnnnnnnnnnnnnnnnnnnnnnnnnnnnnnnnnnnnnnnnnnnnnnnnnnnnnnnnnnnnnnnnnnnnnnnnnnnnnnnnnnnnnnnnnnnnnnnnnnnnnnnnnnnnnnnnnnnnnnnnnnnnnnnnnnnnnnnnnnnnnnnnnnnnnnnnnnnnnnnnnnnnnnnnnnnnnnnnnnnnnnnnnnnnnnnnnnnnnnnnnnnnnnnnnnnnnnnnnnnnnnnnnnnnnnnnnnnnnnnnnnnnnnnnnnnnnnnnnnnnnnnnnnnnnnnnnnnnnnnnnnnnnnnnnnnnnnnnnnnnnnnnnnnnnnnnnnnnnnnnnnnnnnnnnnnnnnnnnnnnnnnnnnnnnnnnnnnnnnnnnnnnnnnnnnnnnnnnnnnnnnnnnnnnnnnnnnnnnnnnnnnnnnnnnnnnnnnnnnnnnnnnnnnnnnnnnnnnnnnnnnnnnnnnnnnnnnnnnnnnnnnnnnnnnnnnnnnnnnnnnnnnnnnnnnnnnnnnnnnnnnnnnnnnnnnnnnnnnnnnnnnnnnnnnnnnnnnnnnnnnnnnnnnnnnnnnnnnnnnnnnnnnnnnnnnnnnnnnnnnnnnnnnnnnnnnnnnnnnnnnnnnnnnnnnnnnnnnnnnnnnnnnnnnnnnnnnnnnnnnnnnnnnnnnnnnnnnnnnnnnnnnnnnnnnnnnnnnnnnnnnnnnnnnnnnnnnnnnnnnnnnnnnnnnnnnnnnnnnnnnnnnnnnnnnnnnnnnnnnnnnnnnnnnnnnnnnnnnnnnnnnnnnnnnnnnnnnnnnnnnnnnnnnnnnnnnnnnnnnnnnnnnnnnnnnnnnnnnnnnnnnnnnnnnnnnnnnnnnnnnnnnnnnnnnnnnnnnnnnnnnnnnnnnnnnnnnnnnnnnnnnnnnnnnnnnnnnnnnnnnnnnnnnnnnnnnnnnnnnnnnnnnnnnnnnnnnnnnnnnnnnnnnnnnnnnnnnnnnnnnnnnnnnnnnnnnnnnnnnnnnnnnnnnnnnnnnnnnnnnnnnnnnnnnnnnnnnnnnnnnnnnnnnnnnnnnnnnnnnnnnnnnnnnnnnnnnnnnnnnnnnnnnnnnnnnnnnnnnnnnnnnnnnnnnnnnnnnnnnnnnnnnnnnnnnnnnnnnnnnnnnnnnnnnnnnnnnnnnnnnnnnnnnnnnnnnnnnnnnnnnnnnnnnnnnnnnnnnnnnnnnnnnnnnnnnnnnnnnnnnnnnnnnnnnnnnnnnnnnnnnnnnnnnnnnnnnnnnnnnnnnnnnnnnnnnnnnnnnnnnnnnnnnnnnnnnnnnnnnnnnnnnnnnnnnnnnnnnnnnnnnnnnnnnnnnnnnnnnnnnnnnnnnnnnnnnnnnnnnnnnnnnnnnnnnnnnnnnnnnnnnnnnnnnnnnnnnnnnnnnnnnnnnnnnnnnnnnnnnnnnnnnnnnnnnnnnnnnnnnnnnnnnnnnnnnnnnnnnnnnnnnnnnnnnnnnnnnnnnnnnnnnnnnnnnnnnnnnnnnnnnnnnnnnnnnnnnnnnnnnnnnnnnnnnnnnnnnnnnnnnnnnnnnnnnnnnnnnnnnnnnnnnnnnnnnnnnnnnnnnnnnnnnnnnnnnnnnnnnnnnnnnnnnnnnnnnnnnnnnnnnnnnnnnnnnnnnnnnnnnnnnnnnnnnnnnnnnnnnnnnnnnnnnnnnnnnnnnnnnnnnnnnnnnnnnnnnnnnnnnnnnnnnnnnnnnnnnnnnnnnnnnnnnnnnnnnnnnnnnnnnnnnnnnnnnnnnnnnnnnnnnnnnnnnnnnnnnnnnnnnnnnnnnnnnnnnnnnnnnnnnnnnnnnnnnnnnnnnnnnnnnnnnnnnnnnnnnnnnnnnnnnnnnnnnnnnnnnnnnnnnnnnnnnnnnnnnnnnnnnnnnnnnnnnnnnnnnnnnnnnnnnnnnnnnnnnnnnnnnnnnnnnnnnnnnnnnnnnnnnnnnnnnnnnnnnnnnnnnnnnnnnnnnnnnnnnnnnnnnnnnnnnnnnnnnnnnnnnnnnnnnnnnnnnnnnnnnnnnnnnnnnnnnnnnnnnnnnnnnnnnnnnnnnnnnnnnnnnnnnnnnnnnnnnnnnnnnnnnnnnnnnnnnnnnnnnnnnnnnnnnnnnnnnnnnnnnnnnnnnnnnnnnnnnnnnnnnnnnnnnnnnnnnnnnnnnnnnnnnnnnnnnnnnnnnnnnnnnnnnnnnnnnnnnnnnnnnnnnnnnnnnnnnnnnnnnnnnnnnnnnnnnnnnnnnnnnnnnnnnnnnnnnnnnnnnnnnnnnnnnnnnnnnnnnnnnnnnnnnnnnnnnnnnnnnnnnnnnnnnnnnnnnnnnnnnnnnnnnnnnnnnnnnnnnnnnnnnnnnnnnnnnnnnnnnnnnnnnnnnnnnnnnnnnnnnnnnnnnnnnnnnnnnnnnnnnnnnnnnnnnnnnnnnnnnnnnnnnnnnnnnnnnnnnnnnnnnnnnnnnnnnnnnnnnnnnnnnnnnnnnnnnnnnnnnnnnnnnnnnnnnnnnnnnnnnnnnnnnnnnnnnnnnnnnnnnnnnnnnnnnnnnnnnnnnnnnnnnnnnnnnnnnnnnnnnnnnnnnnnnnnnnnnnnnnnnnnnnnnnnnnnnnnnnnnnnnnnnnnnnnnnnnnnnnnnnnnnnnnnnnnnnnnnnnnnnnnnnnnnnnnnnnnnnnnnnnnnnnnnnnnnnnnnnnnnnnnnnnnnnnnnnnnnnnnnnnnnnnnnnnnnnnnnnnnnnnnnnnnnnnnnnnnnnnnnnnnnnnnnnnnnnnnnnnnnnnnnnnnnnnnnnnnnnnnnnnnnnnnnnnnnnnnnnnnnnnnnnnnnnnnnnnnnnnnnnnnnnnnnnnnnnnnnnnnnnnnnnnnnnnnnnnnnnnnnnnnnnnnnnnnnnnnnnnnnnnnnnnnnnnnnnnnnnnnnnnnnnnnnnnnnnnnnnnnnnnnnnnnnnnnnnnnnnnnnnnnnnnnnnnnnnnnnnnnnnnnnnnnnnnnnnnnnnnnnnnnnnnnnnnnnnnnnnnnnnnnnnnnnnnnnnnnnnnnnnnnnnnnnnnnnnnnnnnnnnnnnnnnnnnnnnnnnnnnnnnnnnnnnnnnnnnnnnnnnnnnnnnnnnnnnnnnnnnnnnnnnnnnnnnnnnnnnnnnnnnnnnnnnnnnnnnnnnnnnnnnnnnnnnnnnnnnnnnnnnnnnnnnnnnnnnnnnnnnnnnnnnnnnnnnnnnnnnnnnnnnnnnnnnnnnnnnnnnnnnnnnnnnnnnnnnnnnnnnnnnnnnnnnnnnnnnnnnnnnnnnnnnnnnnnnnnnnnnnnnnnnnnnnnnnnnnnnnnnnnnnnnnnnnnnnnnnnnnnnnnnnnnnnnnnnnnnnnnnnnnnnnnnnnnnnnnnnnnnnnnnnnnnnnnnnnnnnnnnnnnnnnnnnnnnnnnnnnnnnnnnnnnnnnnnnnnnnnnnnnnnnnnnnnnnnnnnnnnnnnnnnnnnnnnnnnnnnnnnnnnnnnnnnnnnnnnnnnnnnnnnnnnnnnnnnnnnnnnnnnnnnnnnnnnnnnnnnnnnnnnnnnnnnnnnnnnnnnnnnnnnnnnnnnnnnnnnnnnnnnnnnnnnnnnnnnnnnnnnnnnnnnnnnnnnnnnnnnnnnnnnnnnnnnnnnnnnnnnnnnnnnnnnnnnnnnnnnnnnnnnnnnnnnnnnnnnnnnnnnnnnnnnnnnnnnnnnnnnnnnnnnnnnnnnnnnnnnnnnnnnnnnnnnnnnnnnnnnnnnnnnnnnnnnnnnnnnnnnnnnnnnnnnnnnnnnnnnnnnnnnnnnnnnnnnnnnnnnnnnnnnnnnnnnnnnnnnnnnnnnnnnnnnnnnnnnnnnnnnnnnnnnnnnnnnnnnnnnnnnnnnnnnnnnnnnnnnnnnnnnnnnnnnnnnnnnnnnnnnnnnnnnnnnnnnnnnnnnnnnnnnnnnnnnnnnnnnnnnnnnnnnnnnnnnnnnnnnnnnnnnnnnnnnnnnnnnnnnnnnnnnnnnnnnnnnnnnnnnnnnnnnnnnnnnnnnnnnnnnnnnnnnnnnnnnnnnnnnnnnnnnnnnnnnnnnnnnnnnnnnnnnnnnnnnnnnnnnnnnnnnnnnnnnnnnnnnnnnnnnnnnnnnnnnnnnnnnnnnnnnnnnnnnnnnnnnnnnnnnnnnnnnnnnnnnnnnnnnnnnnnnnnnnnnnnnnnnnnnnnnnnnnnnnnnnnnnnnnnnnnnnnnnnnnnnnnnnnnnnnnnnnnnnnnnnnnnnnnnnnnnnnnnnnnnnnnnnnnnnnnnnnnnnnnnnnnnnnnnnnnnnnnnnnnnnnnnnnnnnnnnnnnnnnnnnnnnnnnnnnnnnnnnnnnnnnnnnnnnnnnnnnnnnnnnnnnnnnnnnnnnnnnnnnnnnnnnnnnnnnnnnnnnnnnnnnnnnnnnnnnnnnnnnnnnnnnnnnnnnnnnnnnnnnnnnnnnnnnnnnnnnnnnnnnnnnnnnnnnnnnnnnnnnnnnnnnnnnnnnnnnnnnnnnnnnnnnnnnnnnnnnnnnnnnnnnnnnnnnnnnnnnnnnnnnnnnnnnnnnnnnnnnnnnnnnnnnnnnnnnnnnnnnnnnnnnnnnnnnnnnnnnnnnnnnnnnnnnnnnnnnnnnnnnnnnnnnnnnnnnnnnnnnnnnnnnnnnnnnnnnnnnnnnnnnnnnnnnnnnnnnnnnnnnnnnnnnnnnnnnnnnnnnnnnnnnnnnnnnnnnnnnnnnnnnnnnnnnnnnnnnnnnnnnnnnnnnnnnnnnnnnnnnnnnnnnnnnnnnnnnnnnnnnnnnnnnnnnnnnnnnnnnnnnnnnnnnnnnnnnnnnnnnnnnnnnnnnnnnnnnnnnnnnnnnnnnnnnnnnnnnnnnnnnnnnnnnnnnnnnnnnnnnnnnnnnnnnnnnnnnnnnnnnnnnnnnnnnnnnnnnnnnnnnnnnnnnnnnnnnnnnnnnnnnnnnnnnnnnnnnnnnnnnnnnnnnnnnnnnnnnnnnnnnnnnnnnnnnnnnnnnnnnnnnnnnnnnnnnnnnnnnnnnnnnnnnnnnnnnnnnnnnnnnnnnnnnnnnnnnnnnnnnnnnnnnnnnnnnnnnnnnnnnnnnnnnnnnnnnnnnnnnnnnnnnnnnnnnnnnnnnnnnnnnnnnnnnnnnnnnnnnnnnnnnnnnnnnnnnnnnnnnnnnnnnnnnnnnnnnnnnnnnnnnnnnnnnnnnnnnnnnnnnnnnnnnnnnnnnnnnnnnnnnnnnnnnnnnnnnnnnnnnnnnnnnnnnnnnnnnnnnnnnnnnnnnnnnnnnnnnnnnnnnnnnnnnnnnnnnnnnnnnnnnnnnnnnnnnnnnnnnnnnnnnnnnnnnnnnnnnnnnnnnnnnnnnnnnnnnnnnnnnnnnnnnnnnnnnnnnnnnnnnnnnnnnnnnnnnnnnnnnnnnnnnnnnnnnnnnnnnnnnnnnnnnnnnnnnnnnnnnnnnnnnnnnnnnnnnnnnnnnnnnnnnnnnnnnnnnnnnnnnnnnnnnnnnnnnnnnnnnnnnnnnnnnnnnnnnnnnnnnnnnnnnnnnnnnnnnnnnnnnnnnnnnnnnnnnnnnnnnnnnnnnnnnnnnnnnnnnnnnnnnnnnnnnnnnnnnnnnnnnnnnnnnnnnnnnnnnnnnnnnnnnnnnnnnnnnnnnnnnnnnnnnnnnnnnnnnnnnnnnnnnnnnnnnnnnnnnnnnnnnnnnnnnnnnnnnnnnnnnnnnnnnnnnnnnnnnnnnnnnnnnnnnnnnnnnnnnnnnnnnnnnnnnnnnnnnnnnnnnnnnnnnnnnnnnnnnnnnnnnnnnnnnnnnnnnnnnnnnnnnnnnnnnnnnnnnnnnnnnnnnnnnnnnnnnnnnnnnnnnnnnnnnnnnnnnnnnnnnnnnnnnnnnnnnnnnnnnnnnnnnnnnnnnnnnnnnnnnnnnnnnnnnnnnnnnnnnnnnnnnnnnnnnnnnnnnnnnnnnnnnnnnnnnnnnnnnnnnnnnnnnnnnnnnnnnnnnnnnnnnnnnnnnnnnnnnnnnnnnnnnnnnnnnnnnnnnnnnnnnnnnnnnnnnnnnnnnnnnnnnnnnnnnnnnnnnnnnnnnnnnnnnnnnnnnnnnnnnnnnnnnnnnnnnnnnnnnnnnnnnnnnnnnnnnnnnnnnnnnnnnnnnnnnnnnnnnnnnnnnnnnnnnnnnnnnnnnnnnnnnnnnnnnnnnnnnnnnnnnnnnnnnnnnnnnnnnnnnnnnnnnnnnnnnnnnnnnnnnnnnnnnnnnnnnnnnnnnnnnnnnnnnnnnnnnnnnnnnnnnnnnnnnnnnnnnnnnnnnnnnnnnnnnnnnnnnnnnnnnnnnnnnnnnnnnnnnnnnnnnnnnnnnnnnnnnnnnnnnnnnnnnnnnnnnnnnnnnnnnnnnnnnnnnnnnnnnnnnnnnnnnnnnnnnnnnnnnnnnnnnnnnnnnnnnnnnnnnnnnnnnnnnnnnnnnnnnnnnnnnnnnnnnnnnnnnnnnnnnnnnnnnnnnnnnnnnnnnnnnnnnnnnnnnnnnnnnnnnnnnnnnnnnnnnnnnnnnnnnnnnnnnnnnnnnnnnnnnnnnnnnnnnnnnnnnnnnnnnnnnnnnnnnnnnnnnnnnnnnnnnnnnnnnnnnnnnnnnnnnnnnnnnnnnnnnnnnnnnnnnnnnnnnnnnnnnnnnnnnnnnnnnnnnnnnnnnnnnnnnnnnnnnnnnnnnnnnnnnnnnnnnnnnnnnnnnnnnnnnnnnnnnnnnnnnnnnnnnnnnnnnnnnnnnnnnnnnnnnnnnnnnnnnnnnnnnnnnnnnnnnnnnnnnnnnnnnnnnnnnnnnnnnnnnnnnnnnnnnnnnnnnnnnnnnnnnnnnnnnnnnnnnnnnnnnnnnnnnnnnnnnnnnnnnnnnnnnnnnnnnnnnnnnnnnnnnnnnnnnnnnnnnnnnnnnnnnnnnnnnnnnnnnnnnnnnnnnnnnnnnnnnnnnnnnnnnnnnnnnnnnnnnnnnnnnnnnnnnnnnnnnnnnnnnnnnnnnnnnnnnnnnnnnnnnnnnnnnnnnnnnnnnnnnnnnnnnnnnnnnnnnnnnnnnnnnnnnnnnnnnnnnnnnnnnnnnnnnnnnnnnnnnnnnnnnnnnnnnnnnnnnnnnnnnnnnnnnnnnnnnnnnnnnnnnnnnnnnnnnnnnnnnnnnnnnnnnnnnnnnnnnnnnnnnnnnnnnnnnnnnnnnnnnnnnnnnnnnnnnnnnnnnnnnnnnnnnnnnnnnnnnnnnnnnnnnnnnnnnnnnnnnnnnnnnnnnnnnnnnnnnnnnnnnnnnnnnnnnnnnnnnnnnnnnnnnnnnnnnnnnnnnnnnnnnnnnnnnnnnnnnnnnnnnnnnnnnnnnnnnnnnnnnnnnnnnnnnnnnnnnnnnnnnnnnnnnnnnnnnnnnnnnnnnnnnnnnnnnnnnnnnnnnnnnnnnnnnnnnnnnnnnnnnnnnnnnnnnnnnnnnnnnnnnnnnnnnnnnnnnnnnnnnnnnnnnnnnnnnnnnnnnnnnnnnnnnnnnnnnnnnnnnnnnnnnnnnnnnnnnnnnnnnnnnnnnnnnnnnnnnnnnnnnnnnnnnnnnnnnnnnnnnnnnnnnnnnnnnnnnnnnnnnnnnnnnnnnnnnnnnnnnnnnnnnnnnnnnnnnnnnnnnnnnnnnnnnnnnnnnnnnnnnnnnnnnnnnnnnnnnnnnnnnnnnnnnnnnnnnnnnnnnnnnnnnnnnnnnnnnnnnnnnnnnnnnnnnnnnnnnnnnnnnnnnnnnnnnnnnnnnnnnnnnnnnnnnnnnnnnnnnnnnnnnnnnnnnnnnnnnnnnnnnnnnnnnnnnnnnnnnnnnnnnnnnnnnnnnnnnnnnnnnnnnnnnnnnnnnnnnnnnnnnnnnnnnnnnnnnnnnnnnnnnnnnnnnnnnnnnnnnnnnnnnnnnnnnnnnnnnnnnnnnnnnnnnnnnnnnnnnnnnnnnnnnnnnnnnnnnnnnnnnnnnnnnnnnnnnnnnnnnnnnnnnnnnnnnnnnnnnnnnnnnnnnnnnnnnnnnnnnnnnnnnnnnnnnnnnnnnnnnnnnnnnnnnnnnnnnnnnnnnnnnnnnnnnnnnnnnnnnnnnnnnnnnnnnnnnnnnnnnnnnnnnnnnnnnnnnnnnnnnnnnnnnnnnnnnnnnnnnnnnnnnnnnnnnnnnnnnnnnnnnnnnnnnnnnnnnnnnnnnnnnnnnnnnnnnnnnnnnnnnnnnnnnnnnnnnnnnnnnnnnnnnnnnnnnnnnnnnnnnnnnnnnnnnnnnnnnnnnnnnnnnnnnnnnnnnnnnnnnnnnnnnnnnnnnnnnnnnnnnnnnnnnnnnnnnnnnnnnnnnnnnnnnnnnnnnnnnnnnnnnnnnnnnnnnnnnnnnnnnnnnnnnnnnnnnnnnnnnnnnnnnnnnnnnnnnnnnnnnnnnnnnnnnnnnnnnnnnnnnnnnnnnnnnnnnnnnnnnnnnnnnnnnnnnnnnnnnnnnnnnnnnnnnnnnnnnnnnnnnnnnnnnnnnnnnnnnnnnnnnnnnnnnnnnnnnnnnnnnnnnnnnnnnnnnnnnnnnnnnnnnnnnnnnnnnnnnnnnnnnnnnnnnnnnnnnnnnnnnnnnnnnnnnnnnnnnnnnnnnnnnnnnnnnnnnnnnnnnnnnnnnnnnnnnnnnnnnnnnnnnnnnnnnnnnnnnnnnnnnnnnnnnnnnnnnnnnnnnnnnnnnnnnnnnnnnnnnnnnnnnnnnnnnnnnnnnnnnnnnnnnnnnnnnnnnnnnnnnnnnnnnnnnnnnnnnnnnnnnnnnnnnnnnnnnnnnnnnnnnnnnnnnnnnnnnnnnnnnnnnnnnnnnnnnnnnnnnnnnnnnnnnnnnnnnnnnnnnnnnnnnnnnnnnnnnnnnnnnnnnnnnnnnnnnnnnnnnnnnnnnnnnnnnnnnnnnnnnnnnnnnnnnnnnnnnnnnnnnnnnnnnnnnnnnnnnnnnnnnnnnnnnnnnnnnnnnnnnnnnnnnnnnnnnnnnnnnnnnnnnnnnnnnnnnnnnnnnnnnnnnnnnnnnnnnnnnnnnnnnnnnnnnnnnnnnnnnnnnnnnnnnnnnnnnnnnnnnnnnnnnnnnnnnnnnnnnnnnnnnnnnnnnnnnnnnnnnnnnnnnnnnnnnnnnnnnnnnnnnnnnnnnnnnnnnnnnnnnnnnnnnnnnnnnnnnnnnnnnnnnnnnnnnnnnnnnnnnnnnnnnnnnnnnnnnnnnnnnnnnnnnnnnnnnnnnnnnnnnnnnnnnnnnnnnnnnnnnnnnnnnnnnnnnnnnnnnnnnnnnnnnnnnnnnnnnnnnnnnnnnnnnnnnnnnnnnnnnnnnnnnnnnnnnnnnnnnnnnnnnnnnnnnnnnnnnnnnnnnnnnnnnnnnnnnnnnnnnnnnnnnnnnnnnnnnnnnnnnnnnnnnnnnnnnnnnnnnnnnnnnnnnnnnnnnnnnnnnnnnnnnnnnnnnnnnnnnnnnnnnnnnnnnnnnnnnnnnnnnnnnnnnnnnnnnnnnnnnnnnnnnnnnnnnnnnnnnnnnnnnnnnnnnnnnnnnnnnnnnnnnnnnnnnnnnnnnnnnnnnnnnnnnnnnnnnnnnnnnnnnnnnnnnnnnnnnnnnnnnnnnnnnnnnnnnnnnnnnnnnnnnnnnnnnnnnnnnnnnnnnnnnnnnnnnnnnnnnnnnnnnnnnnnnnnnnnnnnnnnnnnnnnnnnnnnnnnnnnnnnnnnnnnnnnnnnnnnnnnnnnnnnnnnnnnnnnnnnnnnnnnnnnnnnnnnnnnnnnnnnnnnnnnnnnnnnnnnnnnnnnnnnnnnnnnnnnnnnnnnnnnnnnnnnnnnnnnnnnnnnnnnnnnnnnnnnnnnnnnnnnnnnnnnnnnnnnnnnnnnnnnnnnnnnnnnnnnnnnnnnnnnnnnnnnnnnnnnnnnnnnnnnnnnnnnnnnnnnnnnnnnnnnnnnnnnnnnnnnnnnnnnnnnnnnnnnnnnnnnnnnnnnnnnnnnnnnnnnnnnnnnnnnnnnnnnnnnnnnnnnnnnnnnnnnnnnnnnnnnnnnnnnnnnnnnnnnnnnnnnnnnnnnnnnnnnnnnnnnnnnnnnnnnnnnnnnnnnnnnnnnnnnnnnnnnnnnnnnnnnnnnnnnnnnnnnnnnnnnnnnnnnnnnnnnnnnnnnnnnnnnnnnnnnnnnnnnnnnnnnnnnnnnnnnnnnnnnnnnnnnnnnnnnnnnnnnnnnnnnnnnnnnnnnnnnnnnnnnnnnnnnnnnnnnnnnnnnnnnnnnnnnnnnnnnnnnnnnnnnnnnnnnnnnnnnnnnnnnnnnnnnnnnnnnnnnnnnnnnnnnnnnnnnnnnnnnnnnnnnnnnnnnnnnnnnnnnnnnnnnnnnnnnnnnnnnnnnnnnnnnnnnnnnnnnnnnnnnnnnnnnnnnnnnnnnnnnnnnnnnnnnnnnnnnnnnnnnnnnnnnnnnnnnnnnnnnnnnnnnnnnnnnnnnnnnnnnnnnnnnnnnnnnnnnnnnnnnnnnnnnnnnnnnnnnnnnnnnnnnnnnnnnnnnnnnnnnnnnnnnnnnnnnnnnnnnnnnnnnnnnnnnnnnnnnnnnnnnnnnnnnnnnnnnnnnnnnnnnnnnnnnnnnnnnnnnnnnnnnnnnnnnnnnnnnnnnnnnnnnnnnnnnnnnnnnnnnnnnnnnnnnnnnnnnnnnnnnnnnnnnnnnnnnnnnnnnnnnnnnnnnnnnnnnnnnnnnnnnnnnnnnnnnnnnnnnnnnnnnnnnnnnnnnnnnnnnnnnnnnnnnnnnnnnnnnnnnnnnnnnnnnnnnnnnnnnnnnnnnnnnnnnnnnnnnnnnnnnnnnnnnnnnnnnnnnnnnnnnnnnnnnnnnnnnnnnnnnnnnnnnnnnnnnnnnnnnnnnnnnnnnnnnnnnnnnnnnnnnnnnnnnnnnnnnnnnnnnnnnnnnnnnnnnnnnnnnnnnnnnnnnnnnnnnnnnnnnnnnnnnnnnnnnnnnnnnnnnnnnnnnnnnnnnnnnnnnnnnnnnnnnnnnnnnnnnnnnnnnnnnnnnnnnnnnnnnnnnnnnnnnnnnnnnnnnnnnnnnnnnnnnnnnnnnnnnnnnnnnnnnnnnnnnnnnnnnnnnnnnnnnnnnnnnnnnnnnnnnnnnnnnnnnnnnnnnnnnnnnnnnnnnnnnnnnnnnnnnnnnnnnnnnnnnnnnnnnnnnnnnnnnnnnnnnnnnnnnnnnnnnnnnnnnnnnnnnnnnnnnnnnnnnnnnnnnnnnnnnnnnnnnnnnnnnnnnnnnnnnnnnnnnnnnnnnnnnnnnnnnnnnnnnnnnnnnnnnnnnnnnnnnnnnnnnnnnnnnnnnnnnnnnnnnnnnnnnnnnnnnnnnnnnnnnnnnnnnnnnnnnnnnnnnnnnnnnnnnnnnnnnnnnnnnnnnnnnnnnnnnnnnnnnnnnnnnnnnnnnnnnnnnnnnnnnnnnnnnnnnnnnnnnnnnnnnnnnnnnnnnnnnnnnnnnnnnnnnnnnnnnnnnnnnnnnnnnnnnnnnnnnnnnnnnnnnnnnnnnnnnnnnnnnnnnnnnnnnnnnnnnnnnnnnnnnnnnnnnnnnnnnnnnnnnnnnnnnnnnnnnnnnnnnnnnnnnnnnnnnnnnnnnnnnnnnnnnnnnnnnnnnnnnnnnnnnnnnnnnnnnnnnnnnnnnnnnnnnnnnnnnnnnnnnnnnnnnnnnnnnnnnnnnnnnnnnnnnnnnnnnnnnnnnnnnnnnnnnnnnnnnnnnnnnnnnnnnnnnnnnnnnnnnnnnnnnnnnnnnnnnnnnnnnnnnnnnnnnnnnnnnnnnnnnnnnnnnnnnnnnnnnnnnnnnnnnnnnnnnnnnnnnnnnnnnnnnnnnnnnnnnnnnnnnnnnnnnnnnnnnnnnnnnnnnnnnnnnnnnnnnnnnnnnnnnnnnnnnnnnnnnnnnnnnnnnnnnnnnnnnnnnnnnnnnnnnnnnnnnnnnnnnnnnnnnnnnnnnnnnnnnnnnnnnnnnnnnnnnnnnnnnnnnnnnnnnnnnnnnnnnnnnnnnnnnnnnnnnnnnnnnnnnnnnnnnnnnnnnnnnnnnnnnnnnnnnnnnnnnnnnnnnnnnnnnnnnnnnnnnnnnnnnnnnnnnnnnnnnnnnnnnnnnnnnnnnnnnnnnnnnnnnnnnnnnnnnnnnnnnnnnnnnnnnnnnnnnnnnnnnnnnnnnnnnnnnnnnnnnnnnnnnnnnnnnnnnnnnnnnnnnnnnnnnnnnnnnnnnnnnnnnnnnnnnnnnnnnnnnnnnnnnnnnnnnnnnnnnnnnnnnnnnnnnnnnnnnnnnnnnnnnnnnnnnnnnnnnnnnnnnnnnnnnnnnnnnnnnnnnnnnnnnnnnnnnnnnnnnnnnnnnnnnnnnnnnnnnnnnnnnnnnnnnnnnnnnnnnnnnnnnnnnnnnnnnnnnnnnnnnnnnnnnnnnnnnnnnnnnnnnnnnnnnnnnnnnnnnnnnnnnnnnnnnnnnnnnnnnnnnnnnnnnnnnnnnnnnnnnnnnnnnnnnnnnnnnnnnnnnnnnnnnnnnnnnnnnnnnnnnnnnnnnnnnnnnnnnnnnnnnnnnnnnnnnnnnnnnnnnnnnnnnnnnnnnnnnnnnnnnnnnnnnnnnnnnnnnnnnnnnnnnnnnnnnnnnnnnnnnnnnnnnnnnnnnnnnnnnnnnnnnnnnnnnnnnnnnnnnnnnnnnnnnnnnnnnnnnnnnnnnnnnnnnnnnnnnnnnnnnnnnnnnnnnnnnnnnnnnnnnnnnnnnnnnnnnnnnnnnnnnnnnnnnnnnnnnnnnnnnnnnnnnnnnnnnnnnnnnnnnnnnnnnnnnnnnnnnnnnnnnnnnnnnnnnnnnnnnnnnnnnnnnnnnnnnnnnnnnnnnnnnnnnnnnnnnnnnnnnnnnnnnnnnnnnnnnnnnnnnnnnnnnnnnnnnnnnnnnnnnnnnnnnnnnnnnnnnnnnnnnnnnnnnnnnnnnnnnnnnnnnnnnnnnnnnnnnnnnnnnnnnnnnnnnnnnnnnnnnnnnnnnnnnnnnnnnnnnnnnnnnnnnnnnnnnnnnnnnnnnnnnnnnnnnnnnnnnnnnnnnnnnnnnnnnnnnnnnnnnnnnnnnnnnnnnnnnnnnnnnnnnnnnnnnnnnnnnnnnnnnnnnnnnnnnnnnnnnnnnnnnnnnnnnnnnnnnnnnnnnnnnnnnnnnnnnnnnnnnnnnnnnnnnnnnnnnnnnnnnnnnnnnnnnnnnnnnnnnnnnnnnnnnnnnnnnnnnnnnnnnnnnnnnnnnnnnnnnnnnnnnnnnnnnnnnnnnnnnnnnnnnnnnnnnnnnnnnnnnnnnnnnnnnnnnnnnnnnnnnnnnnnnnnnnnnnnnnnnnnnnnnnnnnnnnnnnnnnnnnnnnnnnnnnnnnnnnnnnnnnnnnnnnnnnnnnnnnnnnnnnnnnnnnnnnnnnnnnnnnnnnnnnnnnnnnnnnnnnnnnnnnnnnnnnnnnnnnnnnnnnnnnnnnnnnnnnnnnnnnnnnnnnnnnnnnnnnnnnnnnnnnnnnnnnnnnnnnnnnnnnnnnnnnnnnnnnnnnnnnnnnnnnnnnnnnnnnnnnnnnnnnnnnnnnnnnnnnnnnnnnnnnnnnnnnnnnnnnnnnnnnnnnnnnnnnnnnnnnnnnnnnnnnnnnnnnnnnnnnnnnnnnnnnnnnnnnnnnnnnnnnnnnnnnnnnnnnnnnnnnnnnnnnnnnnnnnnnnnnnnnnnnnnnnnnnnnnnnnnnnnnnnnnnnnnnnnnnnnnnnnnnnnnnnnnnnnnnnnnnnnnnnnnnnnnnnnnnnnnnnnnnnnnnnnnnnnnnnnnnnnnnnnnnnnnnnnnnnnnnnnnnnnnnnnnnnnnnnnnnnnnnnnnnnnnnnnnnnnnnnnnnnnnnnnnnnnnnnnnnnnnnnnnnnnnnnnnnnnnnnnnnnnnnnnnnnnnnnnnnnnnnnnnnnnnnnnnnnnnnnnnnnnnnnnnnnnnnnnnnnnnnnnnnnnnnnnnnnnnnnnnnnnnnnnnnnnnnnnnnnnnnnnnnnnnnnnnnnnnnnnnnnnnnnnnnnnnnnnnnnnnnnnnnnnnnnnnnnnnnnnnnnnnnnnnnnnnnnnnnnnnnnnnnnnnnnnnnnnnnnnnnnnnnnnnnnnnnnnnnnnnnnnnnnnnnnnnnnnnnnnnnnnnnnnnnnnnnnnnnnnnnnnnnnnnnnnnnnnnnnnnnnnnnnnnnnnnnnnnnnnnnnnnnnnnnnnnnnnnnnnnnnnnnnnnnnnnnnnnnnnnnnnnnnnnnnnnnnnnnnnnnnnnnnnnnnnnnnnnnnnnnnnnnnnnnnnnnnnnnnnnnnnnnnnnnnnnnnnnnnnnnnnnnnnnnnnnnnnnnnnnnnnnnnnnnnnnnnnnnnnnnnnnnnnnnnnnnnnnnnnnnnnnnnnnnnnnnnnnnnnnnnnnnnnnnnnnnnnnnnnnnnnnnnnnnnnnnnnnnnnnnnnnnnnnnnnnnnnnnnnnnnnnnnnnnnnnnnnnnnnnnnnnnnnnnnnnnnnnnnnnnnnnnnnnnnnnnnnnnnnnnnnnnnnnnnnnnnnnnnnnnnnnnnnnnnnnnnnnnnnnnnnnnnnnnnnnnnnnnnnnnnnnnnnnnnnnnnnnnnnnnnnnnnnnnnnnnnnnnnnnnnnnnnnnnnnnnnnnnnnnnnnnnnnnnnnnnnnnnnnnnnnnnnnnnnnnnnnnnnnnnnnnnnnnnnnnnnnnnnnnnnnnnnnnnnnnnnnnnnnnnnnnnnnnnnnnnnnnnnnnnnnnnnnnnnnnnnnnnnnnnnnnnnnnnnnnnnnnnnnnnnnnnnnnnnnnnnnnnnnnnnnnnnnnnnnnnnnnnnnnnnnnnnnnnnnnnnnnnnnnnnnnnnnnnnnnnnnnnnnnnnnnnnnnnnnnnnnnnnnnnnnnnnnnnnnnnnnnnnnnnnnnnnnnnnnnnnnnnnnnnnnnnnnnnnnnnnnnnnnnnnnnnnnnnnnnnnnnnnnnnnnnnnnnnnnnnnnnnnnnnnnnnnnnnnnnnnnnnnnnnnnnnnnnnnnnnnnnnnnnnnnnnnnnnnnnnnnnnnnnnnnnnnnnnnnnnnnnnnnnnnnnnnnnnnnnnnnnnnnnnnnnnnnnnnnnnnnnnnnnnnnnnnnnnnnnnnnnnnnnnnnnnnnnnnnnnnnnnnnnnnnnnnnnnnnnnnnnnnnnnnnnnnnnnnnnnnnnnnnnnnnnnnnnnnnnnnnnnnnnnnnnnnnnnnnnnnnnnnnnnnnnnnnnnnnnnnnnnnnnnnnnnnnnnnnnnnnnnnnnnnnnnnnnnnnnnnnnnnnnnnnnnnnnnnnnnnnnnnnnnnnnnnnnnnnnnnnnnnnnnnnnnnnnnnnnnnnnnnnnnnnnnnnnnnnnnnnnnnnnnnnnnnnnnnnnnnnnnnnnnnnnnnnnnnnnnnnnnnnnnnnnnnnnnnnnnnnnnnnnnnnnnnnnnnnnnnnnnnnnnnnnnnnnnnnnnnnnnnnnnnnnnnnnnnnnnnnnnnnnnnnnnnnnnnnnnnnnnnnnnnnnnnnnnnnnnnnnnnnnnnnnnnnnnnnnnnnnnnnnnnnnnnnnnnnnnnnnnnnnnnnnnnnnnnnnnnnnnnnnnnnnnnnnnnnnnnnnnnnnnnnnnnnnnnnnnnnnnnnnnnnnnnnnnnnnnnnnnnnnnnnnnnnnnnnnnnnnnnnnnnnnnnnnnnnnnnnnnnnnnnnnnnnnnnnnnnnnnnnnnnnnnnnnnnnnnnnnnnnnnnnnnnnnnnnnnnnnnnnnnnnnnnnnnnnnnnnnnnnnnnnnnnnnnnnnnnnnnnnnnnnnnnnnnnnnnnnnnnnnnnnnnnnnnnnnnnnnnnnnnnnnnnnnnnnnnnnnnnnnnnnnnnnnnnnnnnnnnnnnnnnnnnnnnnnnnnnnnnnnnnnnnnnnnnnnnnnnnnnnnnnnnnnnnnnnnnnnnnnnnnnnnnnnnnnnnnnnnnnnnnnnnnnnnnnnnnnnnnnnnnnnnnnnnnnnnnnnnnnnnnnnnnnnnnnnnnnnnnnnnnnnnnnnnnnnnnnnnnnnnnnnnnnnnnnnnnnnnnnnnnnnnnnnnnnnnnnnnnnnnnnnnnnnnnnnnnnnnnnnnnnnnnnnnnnnnnnnnnnnnnnnnnnnnnnnnnnnnnnnnnnnnnnnnnnnnnnnnnnnnnnnnnnnnnnnnnnnnnnnnnnnnnnnnnnnnnnnnnnnnnnnnnnnnnnnnnnnnnnnnnnnnnnnnnnnnnnnnnnnnnnnnnnnnnnnnnnnnnnnnnnnnnnnnnnnnnnnnnnnnnnnnnnnnnnnnnnnnnnnnnnnnnnnnnnnnnnnnnnnnnnnnnnnnnnnnnnnnnnnnnnnnnnnnnnnnnnnnnnnnnnnnnnnnnnnnnnnnnnnnnnnnnnnnnnnnnnnnnnnnnnnnnnnnnnnnnnnnnnnnnnnnnnnnnnnnnnnnnnnnnnnnnnnnnnnnnnnnnnnnnnnnnnnnnnnnnnnnnnnnnnnnnnnnnnnnnnnnnnnnnnnnnnnnnnnnnnnnnnnnnnnnnnnnnnnnnnnnnnnnnnnnnnnnnnnnnnnnnnnnnnnnnnnnnnnnnnnnnnnnnnnnnnnnnnnnnnnnnnnnnnnnnnnnnnnnnnnnnnnnnnnnnnnnnnnnnnnnnnnnnnnnnnnnnnnnnnnnnnnnnnnnnnnnnnnnnnnnnnnnnnnnnnnnnnnnnnnnnnnnnnnnnnnnnnnnnnnnnnnnnnnnnnnnnnnnnnnnnnnnnnnnnnnnnnnnnnnnnnnnnnnnnnnnnnnnnnnnnnnnnnnnnnnnnnnnnnnnnnnnnnnnnnnnnnnnnnnnnnnnnnnnnnnnnnnnnnnnnnnnnnnnnnnnnnnnnnnnnnnnnnnnnnnnnnnnnnnnnnnnnnnnnnnnnnnnnnnnnnnnnnnnnnnnnnnnnnnnnnnnnnnnnnnnnnnnnnnnnnnnnnnnnnnnnnnnnnnnnnnnnnnnnnnnnnnnnnnnnnnnnnnnnnnnnnnnnnnnnnnnnnnnnnnnnnnnnnnnnnnnnnnnnnnnnnnnnnnnnnnnnnnnnnnnnnnnnnnnnnnnnnnnnnnnnnnnnnnnnnnnnnnnnnnnnnnnnnnnnnnnnnnnnnnnnnnnnnnnnnnnnnnnnnnnnnnnnnnnnnnnnnnnnnnnnnnnnnnnnnnnnnnnnnnnnnnnnnnnnnnnnnnnnnnnnnnnnnnnnnnnnnnnnnnnnnnnnnnnnnnnnnnnnnnnnnnnnnnnnnnnnnnnnnnnnnnnnnnnnnnnnnnnnnnnnnnnnnnnnnnnnnnnnnnnnnnnnnnnnnnnnnnnnnnnnnnnnnnnnnnnnnnnnnnnnnnnnnnnnnnnnnnnnnnnnnnnnnnnnnnnnnnnnnnnnnnnnnnnnnnnnnnnnnnnnnnnnnnnnnnnnnnnnnnnnnnnnnnnnnnnnnnnnnnnnnnnnnnnnnnnnnnnnnnnnnnnnnnnnnnnnnnnnnnnnnnnnnnnnnnnnnnnnnnnnnnnnnnnnnnnnnnnnnnnnnnnnnnnnnnnnnnnnnnnnnnnnnnnnnnnnnnnnnnnnnnnnnnnnnnnnnnnnnnnnnnnnnnnnnnnnnnnnnnnnnnnnnnnnnnnnnnnnnnnnnnnnnnnnnnnnnnnnnnnnnnnnnnnnnnnnnnnnnnnnnnnnnnnnnnnnnnnnnnnnnnnnnnnnnnnnnnnnnnnnnnnnnnnnnnnnnnnnnnnnnnnnnnnnnnnnnnnnnnnnnnnnnnnnnnnnnnnnnnnnnnnnnnnnnnnnnnnnnnnnnnnnnnnnnnnnnnnnnnnnnnnnnnnnnnnnnnnnnnnnnnnnnnnnnnnnnnnnnnnnnnnnnnnnnnnnnnnnnnnnnnnnnnnnnnnnnnnnnnnnnnnnnnnnnnnnnnnnnnnnnnnnnnnnnnnnnnnnnnnnnnnnnnnnnnnnnnnnnnnnnnnnnnnnnnnnnnnnnnnnnnnnnnnnnnnnnnnnnnnnnnnnnnnnnnnnnnnnnnnnnnnnnnnnnnnnnnnnnnnnnnnnnnnnnnnnnnnnnnnnnnnnnnnnnnnnnnnnnnnnnnnnnnnnnnnnnnnnnnnnnnnnnnnnnnnnnnnnnnnnnnnnnnnnnnnnnnnnnnnnnnnnnnnnnnnnnnnnnnnnnnnnnnnnnnnnnnnnnnnnnnnnnnnnnnnnnnnnnnnnnnnnnnnnnnnnnnnnnnnnnnnnnnnnnnnnnnnnnnnnnnnnnnnnnnnnnnnnnnnnnnnnnnnnnnnnnnnnnnnnnnnnnnnnnnnnnnnnnnnnnnnnnnnnnnnnnnnnnnnnnnnnnnnnnnnnnnnnnnnnnnnnnnnnnnnnnnnnnnnnnnnnnnnnnnnnnnnnnnnnnnnnnnnnnnnnnnnnnnnnnnnnnnnnnnnnnnnnnnnnnnnnnnnnnnnnnnnnnnnnnnnnnnnnnnnnnnnnnnnnnnnnnnnnnnnnnnnnnnnnnnnnnnnnnnnnnnnnnnnnnnnnnnnnnnnnnnnnnnnnnnnnnnnnnnnnnnnnnnnnnnnnnnnnnnnnnnnnnnnnnnnnnnnnnnnnnnnnnnnnnnnnnnnnnnnnnnnnnnnnnnnnnnnnnnnnnnnnnnnnnnnnnnnnnnnnnnnnnnnnnnnnnnnnnnnnnnnnnnnnnnnnnnnnnnnnnnnnnnnnnnnnnnnnnnnnnnnnnnnnnnnnnnnnnnnnnnnnnnnnnnnnnnnnnnnnnnnnnnnnnnnnnnnnnnnnnnnnnnnnnnnnnnnnnnnnnnnnnnnnnnnnnnnnnnnnnnnnnnnnnnnnnnnnnnnnnnnnnnnnnnnnnnnnnnnnnnnnnnnnnnnnnnnnnnnnnnnnnnnnnnnnnnnnnnnnnnnnnnnnnnnnnnnnnnnnnnnnnnnnnnnnnnnnnnnnnnnnnnnnnnnnnnnnnnnnnnnnnnnnnnnnnnnnnnnnnnnnnnnnnnnnnnnnnnnnnnnnnnnnnnnnnnnnnnnnnnnnnnnnnnnnnnnnnnnnnnnnnnnnnnnnnnnnnnnnnnnnnnnnnnnnnnnnnnnnnnnnnnnnnnnnnnnnnnnnnnnnnnnnnnnnnnnnnnnnnnnnnnnnnnnnnnnnnnnnnnnnnnnnnnnnnnnnnnnnnnnnnnnnnnnnnnnnnnnnnnnnnnnnnnnnnnnnnnnnnnnnnnnnnnnnnnnnnnnnnnnnnnnnnnnnnnnnnnnnnnnnnnnnnnnnnnnnnnnnnnnnnnnnnnnnnnnnnnnnnnnnnnnnnnnnnnnnnnnnnnnnnnnnnnnnnnnnnnnnnnnnnnnnnnnnnnnnnnnnnnnnnnnnnnnnnnnnnnnnnnnnnnnnnnnnnnnnnnnnnnnnnnnnnnnnnnnnnnnnnnnnnnnnnnnnnnnnnnnnnnnnnnnnnnnnnnnnnnnnnnnnnnnnnnnnnnnnnnnnnnnnnnnnnnnnnnnnnnnnnnnnnnnnnnnnnnnnnnnnnnnnnnnnnnnnnnnnnnnnnnnnnnnnnnnnnnnnnnnnnnnnnnnnnnnnnnnnnnnnnnnnnnnnnnnnnnnnnnnnnnnnnnnnnnnnnnnnnnnnnnnnnnnnnnnnnnnnnnnnnnnnnnnnnnnnnnnnnnnnnnnnnnnnnnnnnnnnnnnnnnnnnnnnnnnnnnnnnnnnnnnnnnnnnnnnnnnnnnnnnnnnnnnnnnnnnnnnnnnnnnnnnnnnnnnnnnnnnnnnnnnnnnnnnnnnnnnnnnnnnnnnnnnnnnnnnnnnnnnnnnnnnnnnnnnnnnnnnnnnnnnnnnnnnnnnnnnnnnnnnnnnnnnnnnnnnnnnnnnnnnnnnnnnnnnnnnnnnnnnnnnnnnnnnnnnnnnnnnnnnnnnnnnnnnnnnnnnnnnnnnnnnnnnnnnnnnnnnnnnnnnnnnnnnnnnnnnnnnnnnnnnnnnnnnnnnnnnnnnnnnnnnnnnnnnnnnnnnnnnnnnnnnnnnnnnnnnnnnnnnnnnnnnnnnnnnnnnnnnnnnnnnnnnnnnnnnnnnnnnnnnnnnnnnnnnnnnnnnnnnnnnnnnnnnnnnnnnnnnnnnnnnnnnnnnnnnnnnnnnnnnnnnnnnnnnnnnnnnnnnnnnnnnnnnnnnnnnnnnnnnnnnnnnnnnnnnnnnnnnnnnnnnnnnnnnnnnnnnnnnnnnnnnnnnnnnnnnnnnnnnnnnnnnnnnnnnnnnnnnnnnnnnnnnnnnnnnnnnnnnnnnnnnnnnnnnnnnnnnnnnnnnnnnnnnnnnnnnnnnnnnnnnnnnnnnnnnnnnnnnnnnnnnnnnnnnnnnnnnnnnnnnnnnnnnnnnnnnnnnnnnnnnnnnnnnnnnnnnnnnnnnnnnnnnnnnnnnnnnnnnnnnnnnnnnnnnnnnnnnnnnnnnnnnnnnnnnnnnnnnnnnnnnnnnnnnnnnnnnnnnnnnnnnnnnnnnnnnnnnnnnnnnnnnnnnnnnnnnnnnnnnnnnnnnnnnnnnnnnnnnnnnnnnnnnnnnnnnnnnnnnnnnnnnnnnnnnnnnnnnnnnnnnnnnnnnnnnnnnnnnnnnnnnnnnnnnnnnnnnnnnnnnnnnnnnnnnnnnnnnnnnnnnnnnnnnnnnnnnnnnnnnnnnnnnnnnnnnnnnnnnnnnnnnnnnnnnnnnnnnnnnnnnnnnnnnnnnnnnnnnnnnnnnnnnnnnnnnnnnnnnnnnnnnnnnnnnnnnnnnnnnnnnnnnnnnnnnnnnnnnnnnnnnnnnnnnnnnnnnnnnnnnnnnnnnnnnnnnnnnnnnnnnnnnnnnnnnnnnnnnnnnnnnnnnnnnnnnnnnnnnnnnnnnnnnnnnnnnnnnnnnnnnnnnnnnnnnnnnnnnnnnnnnnnnnnnnnnnnnnnnnnnnnnnnnnnnnnnnnnnnnnnnnnnnnnnnnnnnnnnnnnnnnnnnnnnnnnnnnnnnnnnnnnnnnnnnnnnnnnnnnnnnnnnnnnnnnnnnnnnnnnnnnnnnnnnnnnnnnnnnnnnnnnnnnnnnnnnnnnnnnnnnnnnnnnnnnnnnnnnnnnnnnnnnnnnnnnnnnnnnnnnnnnnnnnnnnnnnnnnnnnnnnnnnnnnnnnnnnnnnnnnnnnnnnnnnnnnnnnnnnnnnnnnnnnnnnnnnnnnnnnnnnnnnnnnnnnnnnnnnnnnnnnnnnnnnnnnnnnnnnnnnnnnnnnnnnnnnnnnnnnnnnnnnnnnnnnnnnnnnnnnnnnnnnnnnnnnnnnnnnnnnnnnnnnnnnnnnnnnnnnnnnnnnnnnnnnnnnnnnnnnnnnnnnnnnnnnnnnnnnnnnnnnnnnnnnnnnnnnnnnnnnnnnnnnnnnnnnnnnnnnnnnnnnnnnnnnnnnnnnnnnnnnnnnnnnnnnnnnnnnnnnnnnnnnnnnnnnnnnnnnnnnnnnnnnnnnnnnnnnnnnnnnnnnnnnnnnnnnnnnnnnnnnnnnnnnnnnnnnnnnnnnnnnnnnnnnnnnnnnnnnnnnnnnnnnnnnnnnnnnnnnnnnnnnnnnnnnnnnnnnnnnnnnnnnnnnnnnnnnnnnnnnnnnnnnnnnnnnnnnnnnnnnnnnnnnnnnnnnnnnnnnnnnnnnnnnnnnnnnnnnnnnnnnnnnnnnnnnnnnnnnnnnnnnnnnnnnnnnnnnnnnnnnnnnnnnnnnnnnnnnnnnnnnnnnnnnnnnnnnnnnnnnnnnnnnnnnnnnnnnnnnnnnnnnnnnnnnnnnnnnnnnnnnnnnnnnnnnnnnnnnnnnnnnnnnnnnnnnnnnnnnnnnnnnnnnnnnnnnnnnnnnnnnnnnnnnnnnnnnnnnnnnnnnnnnnnnnnnnnnnnnnnnnnnnnnnnnnnnnnnnnnnnnnnnnnnnnnnnnnnnnnnnnnnnnnnnnnnnnnnnnnnnnnnnnnnnnnnnnnnnnnnnnnnnnnnnnnnnnnnnnnnnnnnnnnnnnnnnnnnnnnnnnnnnnnnnnnnnnnnnnnnnnnnnnnnnnnnnnnnnnnnnnnnnnnnnnnnnnnnnnnnnnnnnnnnnnnnnnnnnnnnnnnnnnnnnnnnnnnnnnnnnnnnnnnnnnnnnnnnnnnnnnnnnnnnnnnnnnnnnnnnnnnnnnnnnnnnnnnnnnnnnnnnnnnnnnnnnnnnnnnnnnnnnnnnnnnnnnnnnnnnnnnnnnnnnnnnnnnnnnnnnnnnnnnnnnnnnnnnnnnnnnnnnnnnnnnnnnnnnnnnnnnnnnnnnnnnnnnnnnnnnnnnnnnnnnnnnnnnnnnnnnnnnnnnnnnnnnnnnnnnnnnnnnnnnnnnnnnnnnnnnnnnnnnnnnnnnnnnnnnnnnnnnnnnnnnnnnnnnnnnnnnnnnnnnnnnnnnnnnnnnnnnnnnnnnnnnnnnnnnnnnnnnnnnnnnnnnnnnnnnnnnnnnnnnnnnnnnnnnnnnnnnnnnnnnnnnnnnnnnnnnnnnnnnnnnnnnnnnnnnnnnnnnnnnnnnnnnnnnnnnnnnnnnnnnnnnnnnnnnnnnnnnnnnnnnnnnnnnnnnnnnnnnnnnnnnnnnnnnnnnnnnnnnnnnnnnnnnnnnnnnnnnnnnnnnnnnnnnnnnnnnnnnnnnnnnnnnnnnnnnnnnnnnnnnnnnnnnnnnnnnnnnnnnnnnnnnnnnnnnnnnnnnnnnnnnnnnnnnnnnnnnnnnnnnnnnnnnnnnnnnnnnnnnnnnnnnnnnnnnnnnnnnnnnnnnnnnnnnnnnnnnnnnnnnnnnnnnnnnnnnnnnnnnnnnnnnnnnnnnnnnnnnnnnnnnnnnnnnnnnnnnnnnnnnnnnnnnnnnnnnnnnnnnnnnnnnnnnnnnnnnnnnnnnnnnnnnnnnnnnnnnnnnnnnnnnnnnnnnnnnnnnnnnnnnnnnnnnnnnnnnnnnnnnnnnnnnnnnnnnnnnnnnnnnnnnnnnnnnnnnnnnnnnnnnnnnnnnnnnnnnnnnnnnnnnnnnnnnnnnnnnnnnnnnnnnnnnnnnnnnnnnnnnnnnnnnnnnnnnnnnnnnnnnnnnnnnnnnnnnnnnnnnnnnnnnnnnnnnnnnnnnnnnnnnnnnnnnnnnnnnnnnnnnnnnnnnnnnnnnnnnnnnnnnnnnnnnnnnnnnnnnnnnnnnnnnnnnnnnnnnnnnnnnnnnnnnnnnnnnnnnnnnnnnnnnnnnnnnnnnnnnnnnnnnnnnnnnnnnnnnnnnnnnnnnnnnnnnnnnnnnnnnnnnnnnnnnnnnnnnnnnnnnnnnnnnnnnnnnnnnnnnnnnnnnnnnnnnnnnnnnnnnnnnnnnnnnnnnnnnnnnnnnnnnnnnnnnnnnnnnnnnnnnnnnnnnnnnnnnnnnnnnnnnnnnnnnnnnnnnnnnnnnnnnnnnnnnnnnnnnnnnnnnnnnnnnnnnnnnnnnnnnnnnnnnnnnnnnnnnnnnnnnnnnnnnnnnnnnnnnnnnnnnnnnnnnnnnnnnnnnnnnnnnnnnnnnnnnnnnnnnnnnnnnnnnnnnnnnnnnnnnnnnnnnnnnnnnnnnnnnnnnnnnnnnnnnnnnnnnnnnnnnnnnnnnnnnnnnnnnnnnnnnnnnnnnnnnnnnnnnnnnnnnnnnnnnnnnnnnnnnnnnnnnnnnnnnnnnnnnnnnnnnnnnnnnnnnnnnnnnnnnnnnnnnnnnnnnnnnnnnnnnnnnnnnnnnnnnnnnnnnnnnnnnnnnnnnnnnnnnnnnnnnnnnnnnnnnnnnnnnnnnnnnnnnnnnnnnnnnnnnnnnnnnnnnnnnnnnnnnnnnnnnnnnnnnnnnnnnnnnnnnnnnnnnnnnnnnnnnnnnnnnnnnnnnnnnnnnnnnnnnnnnnnnnnnnnnnnnnnnnnnnnnnnnnnnnnnnnnnnnnnnnnnnnnnnnnnnnnnnnnnnnnnnnnnnnnnnnnnnnnnnnnnnnnnnnnnnnnnnnnnnnnnnnnnnnnnnnnnnnnnnnnnnnnnnnnnnnnnnnnnnnnnnnnnnnnnnnnnnnnnnnnnnnnnnnnnnnnnnnnnnnnnnnnnnnnnnnnnnnnnnnnnnnnnnnnnnnnnnnnnnnnnnnnnnnnnnnnnnnnnnnnnnnnnnnnnnnnnnnnnnnnnnnnnnnnnnnnnnnnnnnnnnnnnnnnnnnnnnnnnnnnnnnnnnnnnnnnnnnnnnnnnnnnnnnnnnnnnnnnnnnnnnnnnnnnnnnnnnnnnnnnnnnnnnnnnnnnnnnnnnnnnnnnnnnnnnnnnnnnnnnnnnnnnnnnnnnnnnnnnnnnnnnnnnnnnnnnnnnnnnnnnnnnnnnnnnnnnnnnnnnnnnnnnnnnnnnnnnnnnnnnnnnnnnnnnnnnnnnnnnnnnnnnnnnnnnnnnnnnnnnnnnnnnnnnnnnnnnnnnnnnnnnnnnnnnnnnnnnnnnnnnnnnnnnnnnnnnnnnnnnnnnnnnnnnnnnnnnnnnnnnnnnnnnnnnnnnnnnnnnnnnnnnnnnnnnnnnnnnnnnnnnnnnnnnnnnnnnnnnnnnnnnnnnnnnnnnnnnnnnnnnnnnnnnnnnnnnnnnnnnnnnnnnnnnnnnnnnnnnnnnnnnnnnnnnnnnnnnnnnnnnnnnnnnnnnnnnnnnnnnnnnnnnnnnnnnnnnnnnnnnnnnnnnnnnnnnnnnnnnnnnnnnnnnnnnnnnnnnnnnnnnnnnnnnnnnnnnnnnnnnnnnnnnnnnnnnnnnnnnnnnnnnnnnnnnnnnnnnnnnnnnnnnnnnnnnnnnnnnnnnnnnnnnnnnnnnnnnnnnnnnnnnnnnnnnnnnnnnnnnnnnnnnnnnnnnnnnnnnnnnnnnnnnnnnnnnnnnnnnnnnnnnnnnnnnnnnnnnnnnnnnnnnnnnnnnnnnnnnnnnnnnnnnnnnnnnnnnnnnnnnnnnnnnnnnnnnnnnnnnnnnnnnnnnnnnnnnnnnnnnnnnnnnnnnnnnnnnnnnnnnnnnnnnnnnnnnnnnnnnnnnnnnnnnnnnnnnnnnnnnnnnnnnnnnnnnnnnnnnnnnnnnnnnnnnnnnnnnnnnnnnnnnnnnnnnnnnnnnnnnnnnnnnnnnnnnnnnnnnnnnnnnnnnnnnnnnnnnnnnnnnnnnnnnnnnnnnnnnnnnnnnnnnnnnnnnnnnnnnnnnnnnnnnnnnnnnnnnnnnnnnnnnnnnnnnnnnnnnnnnnnnnnnnnnnnnnnnnnnnnnnnnnnnnnnnnnnnnnnnnnnnnnnnnnnnnnnnnnnnnnnnnnnnnnnnnnnnnnnnnnnnnnnnnnnnnnnnnnnnnnnnnnnnnnnnnnnnnnnnnnnnnnnnnnnnnnnnnnnnnnnnnnnnnnnnnnnnnnnnnnnnnnnnnnnnnnnnnnnnnnnnnnnnnnnnnnnnnnnnnnnnnnnnnnnnnnnnnnnnnnnnnnnnnnnnnnnnnnnnnnnnnnnnnnnnnnnnnnnnnnnnnnnnnnnnnnnnnnnnnnnnnnnnnnnnnnnnnnnnnnnnnnnnnnnnnnnnnnnnnnnnnnnnnnnnnnnnnnnnnnnnnnnnnnnnnnnnnnnnnnnnnnnnnnnnnnnnnnnnnnnnnnnnnnnnnnnnnnnnnnnnnnnnnnnnnnnnnnnnnnnnnnnnnnnnnnnnnnnnnnnnnnnnnnnnnnnnnnnnnnnnnnnnnnnnnnnnnnnnnnnnnnnnnnnnnnnnnnnnnnnnnnnnnnnnnnnnnnnnnnnnnnnnnnnnnnnnnnnnnnnnnnnnnnnnnnnnnnnnnnnnnnnnnnnnnnnnnnnnnnnnnnnnnnnnnnnnnnnnnnnnnnnnnnnnnnnnnnnnnnnnnnnnnnnnnnnnnnnnnnnnnnnnnnnnnnnnnnnnnnnnnnnnnnnnnnnnnnnnnnnnnnnnnnnnnnnnnnnnnnnnnnnnnnnnnnnnnnnnnnnnnnnnnnnnnnnnnnnnnnnnnnnnnnnnnnnnnnnnnnnnnnnnnnnnnnnnnnnnnnnnnnnnnnnnnnnnnnnnnnnnnnnnnnnnnnnnnnnnnnnnnnnnnnnnnnnnnnnnnnnnnnnnnnnnnnnnnnnnnnnnnnnnnnnnnnnnnnnnnnnnnnnnnnnnnnnnnnnnnnnnnnnnnnnnnnnnnnnnnnnnnnnnnnnnnnnnnnnnnnnnnnnnnnnnnnnnnnnnnnnnnnnnnnnnnnnnnnnnnnnnnnnnnnnnnnnnnnnnnnnnnnnnnnnnnnnnnnnnnnnnnnnnnnnnnnnnnnnnnnnnnnnnnnnnnnnnnnnnnnnnnnnnnnnnnnnnnnnnnnnnnnnnnnnnnnnnnnnnnnnnnnnnnnnnnnnnnnnnnnnnnnnnnnnnnnnnnnnnnnnnnnnnnnnnnnnnnnnnnnnnnnnnnnnnnnnnnnnnnnnnnnnnnnnnnnnnnnnnnnnnnnnnnnnnnnnnnnnnnnnnnnnnnnnnnnnnnnnnnnnnnnnnnnnnnnnnnnnnnnnnnnnnnnnnnnnnnnnnnnnnnnnnnnnnnnnnnnnnnnnnnnnnnnnnnnnnnnnnnnnnnnnnnnnnnnnnnnnnnnnnnnnnnnnnnnnnnnnnnnnnnnnnnnnnnnnnnnnnnnnnnnnnnnnnnnnnnnnnnnnnnnnnnnnnnnnnnnnnnnnnnnnnnnnnnnnnnnnnnnnnnnnnnnnnnnnnnnnnnnnnnnnnnnnnnnnnnnnnnnnnnnnnnnnnnnnnnnnnnnnnnnnnnnnnnnnnnnnnnnnnnnnnnnnnnnnnnnnnnnnnnnnnnnnnnnnnnnnnnnnnnnnnnnnnnnnnnnnnnnnnnnnnnnnnnnnnnnnnnnnnnnnnnnnnnnnnnnnnnnnnnnnnnnnnnnnnnnnnnnnnnnnnnnnnnnnnnnnnnnnnnnnnnnnnnnnnnnnnnnnnnnnnnnnnnnnnnnnnnnnnnnnnnnnnnnnnnnnnnnnnnnnnnnnnnnnnnnnnnnnnnnnnnnnnnnnnnnnnnnnnnnnnnnnnnnnnnnnnnnnnnnnnnnnnnnnnnnnnnnnnnnnnnnnnnnnnnnnnnnnnnnnnnnnnnnnnnnnnnnnnnnnnnnnnnnnnnnnnnnnnnnnnnnnnnnnnnnnnnnnnnnnnnnnnnnnnnnnnnnnnnnnnnnnnnnnnnnnnnnnnnnnnnnnnnnnnnnnnnnnnnnnnnnnnnnnnnnnnnnnnnnnnnnnnnnnnnnnnnnnnnnnnnnnnnnnnnnnnnnnnnnnnnnnnnnnnnnnnnnnnnnnnnnnnnnnnnnnnnnnnnnnnnnnnnnnnnnnnnnnnnnnnnnnnnnnnnnnnnnnnnnnnnnnnnnnnnnnnnnnnnnnnnnnnnnnnnnnnnnnnnnnnnnnnnnnnnnnnnnnnnnnnnnnnnnnnnnnnnnnnnnnnnnnnnnnnnnnnnnnnnnnnnnnnnnnnnnnnnnnnnnnnnnnnnnnnnnnnnnnnnnnnnnnnnnnnnnnnnnnnnnnnnnnnnnnnnnnnnnnnnnnnnnnnnnnnnnnnnnnnnnnnnnnnnnnnnnnnnnnnnnnnnnnnnnnnnnnnnnnnnnnnnnnnnnnnnnnnnnnnnnnnnnnnnnnnnnnnnnnnnnnnnnnnnnnnnnnnnnnnnnnnnnnnnnnnnnnnnnnnnnnnnnnnnnnnnnnnnnnnnnnnnnnnnnnnnnnnnnnnnnnnnnnnnnnnnnnnnnnnnnnnnnnnnnnnnnnnnnnnnnnnnnnnnnnnnnnnnnnnnnnnnnnnnnnnnnnnnnnnnnnnnnnnnnnnnnnnnnnnnnnnnnnnnnnnnnnnnnnnnnnnnnnnnnnnnnnnnnnnnnnnnnnnnnnnnnnnnnnnnnnnnnnnnnnnnnnnnnnnnnnnnnnnnnnnnnnnnnnnnnnnnnnnnnnnnnnnnnnnnnnnnnnnnnnnnnnnnnnnnnnnnnnnnnnnnnnnnnnnnnnnnnnnnnnnnnnnnnnnnnnnnnnnnnnnnnnnnnnnnnnnnnnnnnnnnnnnnnnnnnnnnnnnnnnnnnnnnnnnnnnnnnnnnnnnnnnnnnnnnnnnnnnnnnnnnnnnnnnnnnnnnnnnnnnnnnnnnnnnnnnnnnnnnnnnnnnnnnnnnnnnnnnnnnnnnnnnnnnnnnnnnnnnnnnnnnnnnnnnnnnnnnnnnnnnnnnnnnnnnnnnnnnnnnnnnnnnnnnnnnnnnnnnnnnnnnnnnnnnnnnnnnnnnnnnnnnnnnnnnnnnnnnnnnnnnnnnnnnnnnnnnnnnnnnnnnnnnnnnnnnnnnnnnnnnnnnnnnnnnnnnnnnnnnnnnnnnnnnnnnnnnnnnnnnnnnnnnnnnnnnnnnnnnnnnnnnnnnnnnnnnnnnnnnnnnnnnnnnnnnnnnnnnnnnnnnnnnnnnnnnnnnnnnnnnnnnnnnnnnnnnnnnnnnnnnnnnnnnnnnnnnnnnnnnnnnnnnnnnnnnnnnnnnnnnnnnnnnnnnnnnnnnnnnnnnnnnnnnnnnnnnnnnnnnnnnnnnnnnnnnnnnnnnnnnnnnnnnnnnnnnnnnnnnnnnnnnnnnnnnnnnnnnnnnnnnnnnnnnnnnnnnnnnnnnnnnnnnnnnnnnnnnnnnnnnnnnnnnnnnnnnnnnnnnnnnnnnnnnnnnnnnnnnnnnnnnnnnnnnnnnnnnnnnnnnnnnnnnnnnnnnnnnnnnnnnnnnnnnnnnnnnnnnnnnnnnnnnnnnnnnnnnnnnnnnnnnnnnnnnnnnnnnnnnnnnnnnnnnnnnnnnnnnnnnnnnnnnnnnnnnnnnnnnnnnnnnnnnnnnnnnnnnnnnnnnnnnnnnnnnnnnnnnnnnnnnnnnnnnnnnnnnnnnnnnnnnnnnnnnnnnnnnnnnnnnnnnnnnnnnnnnnnnnnnnnnnnnnnnnnnnnnnnnnnnnnnnnnnnnnnnnnnnnnnnnnnnnnnnnnnnnnnnnnnnnnnnnnnnnnnnnnnnnnnnnnnnnnnnnnnnnnnnnnnnnnnnnnnnnnnnnnnnnnnnnnnnnnnnnnnnnnnnnnnnnnnnnnnnnnnnnnnnnnnnnnnnnnnnnnnnnnnnnnnnnnnnnnnnnnnnnnnnnnnnnnnnnnnnnnnnnnnnnnnnnnnnnnnnnnnnnnnnnnnnnnnnnnnnnnnnnnnnnnnnnnnnnnnnnnnnnnnnnnnnnnnnnnnnnnnnnnnnnnnnnnnnnnnnnnnnnnnnnnnnnnnnnnnnnnnnnnnnnnnnnnnnnnnnnnnnnnnnnnnnnnnnnnnnnnnnnnnnnnnnnnnnnnnnnnnnnnnnnnnnnnnnnnnnnnnnnnnnnnnnnnnnnnnnnnnnnnnnnnnnnnnnnnnnnnnnnnnnnnnnnnnnnnnnnnnnnnnnnnnnnnnnnnnnnnnnnnnnnnnnnnnnnnnnnnnnnnnnnnnnnnnnnnnnnnnnnnnnnnnnnnnnnnnnnnnnnnnnnnnnnnnnnnnnnnnnnnnnnnnnnnnnnnnnnnnnnnnnnnnnnnnnnnnnnnnnnnnnnnnnnnnnnnnnnnnnnnnnnnnnnnnnnnnnnnnnnnnnnnnnnnnnnnnnnnnnnnnnnnnnnnnnnnnnnnnnnnnnnnnnnnnnnnnnnnnnnnnnnnnnnnnnnnnnnnnnnnnnnnnnnnnnnnnnnnnnnnnnnnnnnnnnnnnnnnnnnnnnnnnnnnnnnnnnnnnnnnnnnnnnnnnnnnnnnnnnnnnnnnnnnnnnnnnnnnnnnnnnnnnnnnnnnnnnnnnnnnnnnnnnnnnnnnnnnnnnnnnnnnnnnnnnnnnnnnnnnnnnnnnnnnnnnnnnnnnnnnnnnnnnnnnnnnnnnnnnnnnnnnnnnnnnnnnnnnnnnnnnnnnnnnnnnnnnnnnnnnnnnnnnnnnnnnnnnnnnnnnnnnnnnnnnnnnnnnnnnnnnnnnnnnnnnnnnnnnnnnnnnnnnnnnnnnnnnnnnnnnnnnnnnnnnnnnnnnnnnnnnnnnnnnnnnnnnnnnnnnnnnnnnnnnnnnnnnnnnnnnnnnnnnnnnnnnnnnnnnnnnnnnnnnnnnnnnnnnnnnnnnnnnnnnnnnnnnnnnnnnnnnnnnnnnnnnnnnnnnnnnnnnnnnnnnnnnnnnnnnnnnnnnnnnnnnnnnnnnnnnnnnnnnnnnnnnnnnnnnnnnnnnnnnnnnnnnnnnnnnnnnnnnnnnnnnnnnnnnnnnnnnnnnnnnnnnnnnnnnnnnnnnnnnnnnnnnnnnnnnnnnnnnnnnnnnnnnnnnnnnnnnnnnnnnnnnnnnnnnnnnnnnnnnnnnnnnnnnnnnnnnnnnnnnnnnnnnnnnnnnnnnnnnnnnnnnnnnnnnnnnnnnnnnnnnnnnnnnnnnnnnnnnnnnnnnnnnnnnnnnnnnnnnnnnnnnnnnnnnnnnnnnnnnnnnnnnnnnnnnnnnnnnnnnnnnnnnnnnnnnnnnnnnnnnnnnnnnnnnnnnnnnnnnnnnnnnnnnnnnnnnnnnnnnnnnnnnnnnnnnnnnnnnnnnnnnnnnnnnnnnnnnnnnnnnnnnnnnnnnnnnnnnnnnnnnnnnnnnnnnnnnnnnnnnnnnnnnnnnnnnnnnnnnnnnnnnnnnnnnnnnnnnnnnnnnnnnnnnnnnnnnnnnnnnnnnnnnnnnnnnnnnnnnnnnnnnnnnnnnnnnnnnnnnnnnnnnnnnnnnnnnnnnnnnnnnnnnnnnnnnnnnnnnnnnnnnnnnnnnnnnnnnnnnnnnnnnnnnnnnnnnnnnnnnnnnnnnnnnnnnnnnnnnnnnnnnnnnnnnnnnnnnnnnnnnnnnnnnnnnnnnnnnnnnnnnnnnnnnnnnnnnnnnnnnnnnnnnnnnnnnnnnnnnnnnnnnnnnnnnnnnnnnnnnnnnnnnnnnnnnnnnnnnnnnnnnnnnnnnnnnnnnnnnnnnnnnnnnnnnnnnnnnnnnnnnnnnnnnnnnnnnnnnnnnnnnnnnnnnnnnnnnnnnnnnnnnnnnnnnnnnnnnnnnnnnnnnnnnnnnnnnnnnnnnnnnnnnnnnnnnnnnnnnnnnnnnnnnnnnnnnnnnnnnnnnnnnnnnnnnnnnnnnnnnnnnnnnnnnnnnnnnnnnnnnnnnnnnnnnnnnnnnnnnnnnnnnnnnnnnnnnnnnnnnnnnnnnnnnnnnnnnnnnnnnnnnnnnnnnnnnnnnnnnnnnnnnnnnnnnnnnnnnnnnnnnnnnnnnnnnnnnnnnnnnnnnnnnnnnnnnnnnnnnnnnnnnnnnnnnnnnnnnnnnnnnnnnnnnnnnnnnnnnnnnnnnnnnnnnnnnnnnnnnnnnnnnnnnnnnnnnnnnnnnnnnnnnnnnnnnnnnnnnnnnnnnnnnnnnnnnnnnnnnnnnnnnnnnnnnnnnnnnnnnnnnnnnnnnnnnnnnnnnnnnnnnnnnnnnnnnnnnnnnnnnnnnnnnnnnnnnnnnnnnnnnnnnnnnnnnnnnnnnnnnnnnnnnnnnnnnnnnnnnnnnnnnnnnnnnnnnnnnnnnnnnnnnnnnnnnnnnnnnnnnnnnnnnnnnnnnnnnnnnnnnnnnnnnnnnnnnnnnnnnnnnnnnnnnnnnnnnnnnnnnnnnnnnnnnnnnnnnnnnnnnnnnnnnnnnnnnnnnnnnnnnnnnnnnnnnnnnnnnnnnnnnnnnnnnnnnnnnnnnnnnnnnnnnnnnnnnnnnnnnnnnnnnnnnnnnnnnnnnnnnnnnnnnnnnnnnnnnnnnnnnnnnnnnnnnnnnnnnnnnnnnnnnnnnnnnnnnnnnnnnnnnnnnnnnnnnnnnnnnnnnnnnnnnnnnnnnnnnnnnnnnnnnnnnnnnnnnnnnnnnnnnnnnnnnnnnnnnnnnnnnnnnnnnnnnnnnnnnnnnnnnnnnnnnnnnnnnnnnnnnnnnnnnnnnnnnnnnnnnnnnnnnnnnnnnnnnnnnnnnnnnnnnnnnnnnnnnnnnnnnnnnnnnnnnnnnnnnnnnnnnnnnnnnnnnnnnnnnnnnnnnnnnnnnnnnnnnnnnnnnnnnnnnnnnnnnnnnnnnnnnnnnnnnnnnnnnnnnnnnnnnnnnnnnnnnnnnnnnnnnnnnnnnnnnnnnnnnnnnnnnnnnnnnnnnnnnnnnnnnnnnnnnnnnnnnnnnnnnnnnnnnnnnnnnnnnnnnnnnnnnnnnnnnnnnnnnnnnnnnnnnnnnnnnnnnnnnnnnnnnnnnnnnnnnnnnnnnnnnnnnnnnnnnnnnnnnnnnnnnnnnnnnnnnnnnnnnnnnnnnnnnnnnnnnnnnnnnnnnnnnnnnnnnnnnnnnnnnnnnnnnnnnnnnnnnnnnnnnnnnnnnnnnnnnnnnnnnnnnnnnnnnnnnnnnnnnnnnnnnnnnnnnnnnnnnnnnnnnnnnnnnnnnnnnnnnnnnnnnnnnnnnnnnnnnnnnnnnnnnnnnnnnnnnnnnnnnnnnnnnnnnnnnnnnnnnnnnnnnnnnnnnnnnnnnnnnnnnnnnnnnnnnnnnnnnnnnnnnnnnnnnnnnnnnnnnnnnnnnnnnnnnnnnnnnnnnnnnnnnnnnnnnnnnnnnnnnnnnnnnnnnnnnnnnnnnnnnnnnnnnnnnnnnnnnnnnnnnnnnnnnnnnnnnnnnnnnnnnnnnnnnnnnnnnnnnnnnnnnnnnnnnnnnnnnnnnnnnnnnnnnnnnnnnnnnnnnnnnnnnnnnnnnnnnnnnnnnnnnnnnnnnnnnnnnnnnnnnnnnnnnnnnnnnnnnnnnnnnnnnnnnnnnnnnnnnnnnnnnnnnnnnnnnnnnnnnnnnnnnnnnnnnnnnnnnnnnnnnnnnnnnnnnnnnnnnnnnnnnnnnnnnnnnnnnnnnnnnnnnnnnnnnnnnnnnnnnnnnnnnnnnnnnnnnnnnnnnnnnnnnnnnnnnnnnnnnnnnnnnnnnnnnnnnnnnnnnnnnnnnnnnnnnnnnnnnnnnnnnnnnnnnnnnnnnnnnnnnnnnnnnnnnnnnnnnnnnnnnnnnnnnnnnnnnnnnnnnnnnnnnnnnnnnnnnnnnnnnnnnnnnnnnnnnnnnnnnnnnnnnnnnnnnnnnnnnnnnnnnnnnnnnnnnnnnnnnnnnnnnnnnnnnnnnnnnnnnnnnnnnnnnnnnnnnnnnnnnnnnnnnnnnnnnnnnnnnnnnnnnnnnnnnnnnnnnnnnnnnnnnnnnnnnnnnnnnnnnnnnnnnnnnnnnnnnnnnnnnnnnnnnnnnnnnnnnnnnnnnnnnnnnnnnnnnnnnnnnnnnnnnnnnnnnnnnnnnnnnnnnnnnnnnnnnnnnnnnnnnnnnnnnnnnnnnnnnnnnnnnnnnnnnnnnnnnnnnnnnnnnnnnnnnnnnnnnnnnnnnnnnnnnnnnnnnnnnnnnnnnnnnnnnnnnnnnnnnnnnnnnnnnnnnnnnnnnnnnnnnnnnnnnnnnnnnnnnnnnnnnnnnnnnnnnnnnnnnnnnnnnnnnnnnnnnnnnnnnnnnnnnnnnnnnnnnnnnnnnnnnnnnnnnnnnnnnnnnnnnnnnnnnnnnnnnnnnnnnnnnnnnnnnnnnnnnnnnnnnnnnnnnnnnnnnnnnnnnnnnnnnnnnnnnnnnnnnnnnnnnnnnnnnnnnnnnnnnnnnnnnnnnnnnnnnnnnnnnnnnnnnnnnnnnnnnnnnnnnnnnnnnnnnnnnnnnnnnnnnnnnnnnnnnnnnnnnnnnnnnnnnnnnnnnnnnnnnnnnnnnnnnnnnnnnnnnnnnnnnnnnnnnnnnnnnnnnnnnnnnnnnnnnnnnnnnnnnnnnnnnnnnnnnnnnnnnnnnnnnnnnnnnnnnnnnnnnnnnnnnnnnnnnnnnnnnnnnnnnnnnnnnnnnnnnnnnnnnnnnnnnnnnnnnnnnnnnnnnnnnnnnnnnnnnnnnnnnnnnnnnnnnnnnnnnnnnnnnnnnnnnnnnnnnnnnnnnnnnnnnnnnnnnnnnnnnnnnnnnnnnnnnnnnnnnnnnnnnnnnnnnnnnnnnnnnnnnnnnnnnnnnnnnnnnnnnnnnnnnnnnnnnnnnnnnnnnnnnnnnnnnnnnnnnnnnnnnnnnnnnnnnnnnnnnnnnnnnnnnnnnnnnnnnnnnnnnnnnnnnnnnnnnnnnnnnnnnnnnnnnnnnnnnnnnnnnnnnnnnnnnnnnnnnnnnnnnnnnnnnnnnnnnnnnnnnnnnnnnnnnnnnnnnnnnnnnnnnnnnnnnnnnnnnnnnnnnnnnnnnnnnnnnnnnnnnnnnnnnnnnnnnnnnnnnnnnnnnnnnnnnnnnnnnnnnnnnnnnnnnnnnnnnnnnnnnnnnnnnnnnnnnnnnnnnnnnnnnnnnnnnnnnnnnnnnnnnnnnnnnnnnnnnnnnnnnnnnnnnnnnnnnnnnnnnnnnnnnnnnnnnnnnnnnnnnnnnnnnnnnnnnnnnnnnnnnnnnnnnnnnnnnnnnnnnnnnnnnnnnnnnnnnnnnnnnnnnnnnnnnnnnnnnnnnnnnnnnnnnnnnnnnnnnnnnnnnnnnnnnnnnnnnnnnnnnnnnnnnnnnnnnnnnnnnnnnnnnnnnnnnnnnnnnnnnnnnnnnnnnnnnnnnnnnnnnnnnnnnnnnnnnnnnnnnnnnnnnnnnnnnnnnnnnnnnnnnnnnnnnnnnnnnnnnnnnnnnnnnnnnnnnnnnnnnnnnnnnnnnnnnnnnnnnnnnnnnnnnnnnnnnnnnnnnnnnnnnnnnnnnnnnnnnnnnnnnnnnnnnnnnnnnnnnnnnnnnnnnnnnnnnnnnnnnnnnnnnnnnnnnnnnnnnnnnnnnnnnnnnnnnnnnnnnnnnnnnnnnnnnnnnnnnnnnnnnnnnnnnnnnnnnnnnnnnnnnnnnnnnnnnnnnnnnnnnnnnnnnnnnnnnnnnnnnnnnnnnnnnnnnnnnnnnnnnnnnnnnnnnnnnnnnnnnnnnnnnnnnnnnnnnnnnnnnnnnnnnnnnnnnnnnnnnnnnnnnnnnnnnnnnnnnnnnnnnnnnnnnnnnnnnnnnnnnnnnnnnnnnnnnnnnnnnnnnnnnnnnnnnnnnnnnnnnnnnnnnnnnnnnnnnnnnnnnnnnnnnnnnnnnnnnnnnnnnnnnnnnnnnnnnnnnnnnnnnnnnnnnnnnnnnnnnnnnnnnnnnnnnnnnnnnnnnnnnnnnnnnnnnnnnnnnnnnnnnnnnnnnnnnnnnnnnnnnnnnnnnnnnnnnnnnnnnnnnnnnnnnnnnnnnnnnnnnnnnnnnnnnnnnnnnnnnnnnnnnnnnnnnnnnnnnnnnnnnnnnnnnnnnnnnnnnnnnnnnnnnnnnnnnnnnnnnnnnnnnnnnnnnnnnnnnnnnnnnnnnnnnnnnnnnnnnnnnnnnnnnnnnnnnnnnnnnnnnnnnnnnnnnnnnnnnnnnnnnnnnnnnnnnnnnnnnnnnnnnnnnnnnnnnnnnnnnnnnnnnnnnnnnnnnnnnnnnnnnnnnnnnnnnnnnnnnnnnnnnnnnnnnnnnnnnnnnnnnnnnnnnnnnnnnnnnnnnnnnnnnnnnnnnnnnnnnnnnnnnnnnnnnnnnnnnnnnnnnnnnnnnnnnnnnnnnnnnnnnnnnnnnnnnnnnnnnnnnnnnnnnnnnnnnnnnnnnnnnnnnnnnnnnnnnnnnnnnnnnnnnnnnnnnnnnnnnnnnnnnnnnnnnnnnnnnnnnnnnnnnnnnnnnnnnnnnnnnnnnnnnnnnnnnnnnnnnnnnnnnnnnnnnnnnnnnnnnnnnnnnnnnnnnnnnnnnnnnnnnnnnnnnnnnnnnnnnnnnnnnnnnnnnnnnnnnnnnnnnnnnnnnnnnnnnnnnnnnnnnnnnnnnnnnnnnnnnnnnnnnnnnnnnnnnnnnnnnnnnnnnnnnnnnnnnnnnnnnnnnnnnnnnnnnnnnnnnnnnnnnnnnnnnnnnnnnnnnnnnnnnnnnnnnnnnnnnnnnnnnnnnnnnnnnnnnnnnnnnnnnnnnnnnnnnnnnnnnnnnnnnnnnnnnnnnnnnnnnnnnnnnnnnnnnnnnnnnnnnnnnnnnnnnnnnnnnnnnnnnnnnnnnnnnnnnnnnnnnnnnnnnnnnnnnnnnnnnnnnnnnnnnnnnnnnnnnnnnnnnnnnnnnnnnnnnnnnnnnnnnnnnnnnnnnnnnnnnnnnnnnnnnnnnnnnnnnnnnnnnnnnnnnnnnnnnnnnnnnnnnnnnnnnnnnnnnnnnnnnnnnnnnnnnnnnnnnnnnnnnnnnnnnnnnnnnnnnnnnnnnnnnnnnnnnnnnnnnnnnnnnnnnnnnnnnnnnnnnnnnnnnnnnnnnnnnnnnnnnnnnnnnnnnnnnnnnnnnnnnnnnnnnnnnnnnnnnnnnnnnnnnnnnnnnnnnnnnnnnnnnnnnnnnnnnnnnnnnnnnnnnnnnnnnnnnnnnnnnnnnnnnnnnnnnnnnnnnnnnnnnnnnnnnnnnnnnnnnnnnnnnnnnnnnnnnnnnnnnnnnnnnnnnnnnnnnnnnnnnnnnnnnnnnnnnnnnnnnnnnnnnnnnnnnnnnnnnnnnnnnnnnnnnnnnnnnnnnnnnnnnnnnnnnnnnnnnnnnnnnnnnnnnnnnnnnnnnnnnnnnnnnnnnnnnnnnnnnnnnnnnnnnnnnnnnnnnnnnnnnnnnnnnnnnnnnnnnnnnnnnnnnnnnnnnnnnnnnnnnnnnnnnnnnnnnnnnnnnnnnnnnnnnnnnnnnnnnnnnnnnnnnnnnnnnnnnnnnnnnnnnnnnnnnnnnnnnnnnnnnnnnnnnnnnnnnnnnnnnnnnnnnnnnnnnnnnnnnnnnnnnnnnnnnnnnnnnnnnnnnnnnnnnnnnnnnnnnnnnnnnnnnnnnnnnnnnnnnnnnnnnnnnnnnnnnnnnnnnnnnnnnnnnnnnnnnnnnnnnnnnnnnnnnnnnnnnnnnnnnnnnnnnnnnnnnnnnnnnnnnnnnnnnnnnnnnnnnnnnnnnnnnnnnnnnnnnnnnnnnnnnnnnnnnnnnnnnnnnnnnnnnnnnnnnnnnnnnnnnnnnnnnnnnnnnnnnnnnnnnnnnnnnnnnnnnnnnnnnnnnnnnnnnnnnnnnnnnnnnnnnnnnnnnnnnnnnnnnnnnnnnnnnnnnnnnnnnnnnnnnnnnnnnnnnnnnnnnnnnnnnnnnnnnnnnnnnnnnnnnnnnnnnnnnnnnnnnnnnnnnnnnnnnnnnnnnnnnnnnnnnnnnnnnnnnnnnnnnnnnnnnnnnnnnnnnnnnnnnnnnnnnnnnnnnnnnnnnnnnnnnnnnnnnnnnnnnnnnnnnnnnnnnnnnnnnnnnnnnnnnnnnnnnnnnnnnnnnnnnnnnnnnnnnnnnnnnnnnnnnnnnnnnnnnnnnnnnnnnnnnnnnnnnnnnnnnnnnnnnnnnnnnnnnnnnnnnnnnnnnnnnnnnnnnnnnnnnnnnnnnnnnnnnnnnnnnnnnnnnnnnnnnnnnnnnnnnnnnnnnnnnnnnnnnnnnnnnnnnnnnnnnnnnnnnnnnnnnnnnnnnnnnnnnnnnnnnnnnnnnnnnnnnnnnnnnnnnnnnnnnnnnnnnnnnnnnnnnnnnnnnnnnnnnnnnnnnnnnnnnnnnnnnnnnnnnnnnnnnnnnnnnnnnnnnnnnnnnnnnnnnnnnnnnnnnnnnnnnnnnnnnnnnnnnnnnnnnnnnnnnnnnnnnnnnnnnnnnnnnnnnnnnnnnnnnnnnnnnnnnnnnnnnnnnnnnnnnnnnnnnnnnnnnnnnnnnnnnnnnnnnnnnnnnnnnnnnnnnnnnnnnnnnnnnnnnnnnnnnnnnnnnnnnnnnnnnnnnnnnnnnnnnnnnnnnnnnnnnnnnnnnnnnnnnnnnnnnnnnnnnnnnnnnnnnnnnnnnnnnnnnnnnnnnnnnnnnnnnnnnnnnnnnnnnnnnnnnnnnnnnnnnnnnnnnnnnnnnnnnnnnnnnnnnnnnnnnnnnnnnnnnnnnnnnnnnnnnnnnnnnnnnnnnnnnnnnnnnnnnnnnnnnnnnnnnnnnnnnnnnnnnnnnnnnnnnnnnnnnnnnnnnnnnnnnnnnnnnnnnnnnnnnnnnnnnnnnnnnnnnnnnnnnnnnnnnnnnnnnnnnnnnnnnnnnnnnnnnnnnnnnnnnnnnnnnnnnnnnnnnnnnnnnnnnnnnnnnnnnnnnnnnnnnnnnnnnnnnnnnnnnnnnnnnnnnnnnnnnnnnnnnnnnnnnnnnnnnnnnnnnnnnnnnnnnnnnnnnnnnnnnnnnnnnnnnnnnnnnnnnnnnnnnnnnnnnnnnnnnnnnnnnnnnnnnnnnnnnnnnnnnnnnnnnnnnnnnnnnnnnnnnnnnnnnnnnnnnnnnnnnnnnnnnnnnnnnnnnnnnnnnnnnnnnnnnnnnnnnnnnnnnnnnnnnnnnnnnnnnnnnnnnnnnnnnnnnnnnnnnnnnnnnnnnnnnnnnnnnnnnnnnnnnnnnnnnnnnnnnnnnnnnnnnnnnnnnnnnnnnnnnnnnnnnnnnnnnnnnnnnnnnnnnnnnnnnnnnnnnnnnnnnnnnnnnnnnnnnnnnnnnnnnnnnnnnnnnnnnnnnnnnnnnnnnnnnnnnnnnnnnnnnnnnnnnnnnnnnnnnnnnnnnnnnnnnnnnnnnnnnnnnnnnnnnnnnnnnnnnnnnnnnnnnnnnnnnnnnnnnnnnnnnnnnnnnnnnnnnnnnnnnnnnnnnnnnnnnnnnnnnnnnnnnnnnnnnnnnnnnnnnnnnnnnnnnnnnnnnnnnnnnnnnnnnnnnnnnnnnnnnnnnnnnnnnnnnnnnnnnnnnnnnnnnnnnnnnnnnnnnnnnnnnnnnnnnnnnnnnnnnnnnnnnnnnnnnnnnnnnnnnnnnnnnnnnnnnnnnnnnnnnnnnnnnnnnnnnnnnnnnnnnnnnnnnnnnnnnnnnnnnnnnnnnnnnnnnnnnnnnnnnnnnnnnnnnnnnnnnnnnnnnnnnnnnnnnnnnnnnnnnnnnnnnnnnnnnnnnnnnnnnnnnnnnnnnnnnnnnnnnnnnnnnnnnnnnnnnnnnnnnnnnnnnnnnnnnnnnnnnnnnnnnnnnnnnnnnnnnnnnnnnnnnnnnnnnnnnnnnnnnnnnnnnnnnnnnnnnnnnnnnnnnnnnnnnnnnnnnnnnnnnnnnnnnnnnnnnnnnnnnnnnnnnnnnnnnnnnnnnnnnnnnnnnnnnnnnnnnnnnnnnnnnnnnnnnnnnnnnnnnnnnnnnnnnnnnnnnnnnnnnnnnnnnnnnnnnnnnnnnnnnnnnnnnnnnnnnnnnnnnnnnnnnnnnnnnnnnnnnnnnnnnnnnnnnnnnnnnnnnnnnnnnnnnnnnnnnnnnnnnnnnnnnnnnnnnnnnnnnnnnnnnnnnnnnnnnnnnnnnnnnnnnnnnnnnnnnnnnnnnnnnnnnnnnnnnnnnnnnnnnnnnnnnnnnnnnnnnnnnnnnnnnnnnnnnnnnnnnnnnnnnnnnnnnnnnnnnnnnnnnnnnnnnnnnnnnnnnnnnnnnnnnnnnnnnnnnnnnnnnnnnnnnnnnnnnnnnnnnnnnnnnnnnnnnnnnnnnnnnnnnnnnnnnnnnnnnnnnnnnnnnnnnnnnnnnnnnnnnnnnnnnnnnnnnnnnnnnnnnnnnnnnnnnnnnnnnnnnnnnnnnnnnnnnnnnnnnnnnnnnnnnnnnnnnnnnnnnnnnnnnnnnnnnnnnnnnnnnnnnnnnnnnnnnnnnnnnnnnnnnnnnnnnnnnnnnnnnnnnnnnnnnnnnnnnnnnnnnnnnnnnnnnnnnnnnnnnnnnnnnnnnnnnnnnnnnnnnnnnnnnnnnnnnnnnnnnnnnnnnnnnnnnnnnnnnnnnnnnnnnnnnnnnnnnnnnnnnnnnnnnnnnnnnnnnnnnnnnnnnnnnnnnnnnnnnnnnnnnnnnnnnnnnnnnnnnnnnnnnnnnnnnnnnnnnnnnnnnnnnnnnnnnnnnnnnnnnnnnnnnnnnnnnnnnnnnnnnnnnnnnnnnnnnnnnnnnnnnnnnnnnnnnnnnnnnnnnnnnnnnnnnnnnnnnnnnnnnnnnnnnnnnnnnnnnnnnnnnnnnnnnnnnnnnnnnnnnnnnnnnnnnnnnnnnnnnnnnnnnnnnnnnnnnnnnnnnnnnnnnnnnnnnnnnnnnnnnnnnnnnnnnnnnnnnnnnnnnnnnnnnnnnnnnnnnnnnnnnnnnnnnnnnnnnnnnnnnnnnnnnnnnnnnnnnnnnnnnnnnnnnnnnnnnnnnnnnnnnnnnnnnnnnnnnnnnnnnnnnnnnnnnnnnnnnnnnnnnnnnnnnnnnnnnnnnnnnnnnnnnnnnnnnnnnnnnnnnnnnnnnnnnnnnnnnnnnnnnnnnnnnnnnnnnnnnnnnnnnnnnnnnnnnnnnnnnnnnnnnnnnnnnnnnnnnnnnnnnnnnnnnnnnnnnnnnnnnnnnnnnnnnnnnnnnnnnnnnnnnnnnnnnnnnnnnnnnnnnnnnnnnnnnnnnnnnnnnnnnnnnnnnnnnnnnnnnnnnnnnnnnnnnnnnnnnnnnnnnnnnnnnnnnnnnnnnnnnnnnnnnnnnnnnnnnnnnnnnnnnnnnnnnnnnnnnnnnnnnnnnnnnnnnnnnnnnnnnnnnnnnnnnnnnnnnnnnnnnnnnnnnnnnnnnnnnnnnnnnnnnnnnnnnnnnnnnnnnnnnnnnnnnnnnnnnnnnnnnnnnnnnnnnnnnnnnnnnnnnnnnnnnnnnnnnnnnnnnnnnnnnnnnnnnnnnnnnnnnnnnnnnnnnnnnnnnnnnnnnnnnnnnnnnnnnnnnnnnnnnnnnnnnnnnnnnnnnnnnnnnnnnnnnnnnnnnnnnnnnnnnnnnnnnnnnnnnnnnnnnnnnnnnnnnnnnnnnnnnnnnnnnnnnnnnnnnnnnnnnnnnnnnnnnnnnnnnnnnnnnnnnnnnnnnnnnnnnnnnnnnnnnnnnnnnnnnnnnnnnnnnnnnnnnnnnnnnnnnnnnnnnnnnnnnnnnnnnnnnnnnnnnnnnnnnnnnnnnnnnnnnnnnnnnnnnnnnnnnnnnnnnnnnnnnnnnnnnnnnnnnnnnnnnnnnnnnnnnnnnnnnnnnnnnnnnnnnnnnnnnnnnnnnnnnnnnnnnnnnnnnnnnnnnnnnnnnnnnnnnnnnnnnnnnnnnnnnnnnnnnnnnnnnnnnnnnnnnnnnnnnnnnnnnnnnnnnnnnnnnnnnnnnnnnnnnnnnnnnnnnnnnnnnnnnnnnnnnnnnnnnnnnnnnnnnnnnnnnnnnnnnnnnnnnnnnnnnnnnnnnnnnnnnnnnnnnnnnnnnnnnnnnnnnnnnnnnnnnnnnnnnnnnnnnnnnnnnnnnnnnnnnnnnnnnnnnnnnnnnnnnnnnnnnnnnnnnnnnnnnnnnnnnnnnnnnnnnnnnnnnnnnnnnnnnnnnnnnnnnnnnnnnnnnnnnnnnnnnnnnnnnnnnnnnnnnnnnnnnnnnnnnnnnnnnnnnnnnnnnnnnnnnnnnnnnnnnnnnnnnnnnnnnnnnnnnnnnnnnnnnnnnnnnnnnnnnnnnnnnnnnnnnnnnnnnnnnnnnnnnnnnnnnnnnnnnnnnnnnnnnnnnnnnnnnnnnnnnnnnnnnnnnnnnnnnnnnnnnnnnnnnnnnnnnnnnnnnnnnnnnnnnnnnnnnnnnnnnnnnnnnnnnnnnnnnnnnnnnnnnnnnnnnnnnnnnnnnnnnnnnnnnnnnnnnnnnnnnnnnnnnnnnnnnnnnnnnnnnnnnnnnnnnnnnnnnnnnnnnnnnnnnnnnnnnnnnnnnnnnnnnnnnnnnnnnnnnnnnnnnnnnnnnnnnnnnnnnnnnnnnnnnnnnnnnnnnnnnnnnnnnnnnnnnnnnnnnnnnnnnnnnnnnnnnnnnnnnnnnnnnnnnnnnnnnnnnnnnnnnnnnnnnnnnnnnnnnnnnnnnnnnnnnnnnnnnnnnnnnnnnnnnnnnnnnnnnnnnnnnnnnnnnnnnnnnnnnnnnnnnnnnnnnnnnnnnnnnnnnnnnnnnnnnnnnnnnnnnnnnnnnnnnnnnnnnnnnnnnnnnnnnnnnnnnnnnnnnnnnnnnnnnnnnnnnnnnnnnnnnnnnnnnnnnnnnnnnnnnnnnnnnnnnnnnnnnnnnnnnnnnnnnnnnnnnnnnnnnnnnnnnnnnnnnnnnnnnnnnnnnnnnnnnnnnnnnnnnnnnnnnnnnnnnnnnnnnnnnnnnnnnnnnnnnnnnnnnnnnnnnnnnnnnnnnnnnnnnnnnnnnnnnnnnnnnnnnnnnnnnnnnnnnnnnnnnnnnnnnnnnnnnnnnnnnnnnnnnnnnnnnnnnnnnnnnnnnnnnnnnnnnnnnnnnnnnnnnnnnnnnnnnnnnnnnnnnnnnnnnnnnnnnnnnnnnnnnnnnnnnnnnnnnnnnnnnnnnnnnnnnnnnnnnnnnnnnnnnnnnnnnnnnnnnnnnnnnnnnnnnnnnnnnnnnnnnnnnnnnnnnnnnnnnnnnnnnnnnnnnnnnnnnnnnnnnnnnnnnnnnnnnnnnnnnnnnnnnnnnnnnnnnnnnnnnnnnnnnnnnnnnnnnnnnnnnnnnnnnnnnnnnnnnnnnnnnnnnnnnnnnnnnnnnnnnnnnnnnnnnnnnnnnnnnnnnnnnnnnnnnnnnnnnnnnnnnnnnnnnnnnnnnnnnnnnnnnnnnnnnnnnnnnnnnnnnnnnnnnnnnnnnnnnnnnnnnnnnnnnnnnnnnnnnnnnnnnnnnnnnnnnnnnnnnnnnnnnnnnnnnnnnnnnnnnnnnnnnnnnnnnnnnnnnnnnnnnnnnnnnnnnnnnnnnnnnnnnnnnnnnnnnnnnnnnnnnnnnnnnnnnnnnnnnnnnnnnnnnnnnnnnnnnnnnnnnnnnnnnnnnnnnnnnnnnnnnnnnnnnnnnnnnnnnnnnnnnnnnnnnnnnnnnnnnnnnnnnnnnnnnnnnnnnnnnnnnnnnnnnnnnnnnnnnnnnnnnnnnnnnnnnnnnnnnnnnnnnnnnnnnnnnnnnnnnnnnnnnnnnnnnnnnnnnnnnnnnnnnnnnnnnnnnnnnnnnnnnnnnnnnnnnnnnnnnnnnnnnnnnnnnnnnnnnnnnnnnnnnnnnnnnnnnnnnnnnnnnnnnnnnnnnnnnnnnnnnnnnnnnnnnnnnnnnnnnnnnnnnnnnnnnnnnnnnnnnnnnnnnnnnnnnnnnnnnnnnnnnnnnnnnnnnnnnnnnnnnnnnnnnnnnnnnnnnnnnnnnnnnnnnnnnnnnnnnnnnnnnnnnnnnnnnnnnnnnnnnnnnnnnnnnnnnnnnnnnnnnnnnnnnnnnnnnnnnnnnnnnnnnnnnnnnnnnnnnnnnnnnnnnnnnnnnnnnnnnnnnnnnnnnnnnnnnnnnnnnnnnnnnnnnnnnnnnnnnnnnnnnnnnnnnnnnnnnnnnnnnnnnnnnnnnnnnnnnnnnnnnnnnnnnnnnnnnnnnnnnnnnnnnnnnnnnnnnnnnnnnnnnnnnnnnnnnnnnnnnnnnnnnnnnnnnnnnnnnnnnnnnnnnnnnnnnnnnnnnnnnnnnnnnnnnnnnnnnnnnnnnnnnnnnnnnnnnnnnnnnnnnnnnnnnnnnnnnnnnnnnnnnnnnnnnnnnnnnnnnnnnnnnnnnnnnnnnnnnnnnnnnnnnnnnnnnnnnnnnnnnnnnnnnnnnnnnnnnnnnnnnnnnnnnnnnnnnnnnnnnnnnnnnnnnnnnnnnnnnnnnnnnnnnnnnnnnnnnnnnnnnnnnnnnnnnnnnnnnnnnnnnnnnnnnnnnnnnnnnnnnnnnnnnnnnnnnnnnnnnnnnnnnnnnnnnnnnnnnnnnnnnnnnnnnnnnnnnnnnnnnnnnnnnnnnnnnnnnnnnnnnnnnnnnnnnnnnnnnnnnnnnnnnnnnnnnnnnnnnnnnnnnnnnnnnnnnnnnnnnnnnnnnnnnnnnnnnnnnnnnnnnnnnnnnnnnnnnnnnnnnnnnnnnnnnnnnnnnnnnnnnnnnnnnnnnnnnnnnnnnnnnnnnnnnnnnnnnnnnnnnnnnnnnnnnnnnnnnnnnnnnnnnnnnnnnnnnnnnnnnnnnnnnnnnnnnnnnnnnnnnnnnnnnnnnnnnnnnnnnnnnnnnnnnnnnnnnnnnnnnnnnnnnnnnnnnnnnnnnnnnnnnnnnnnnnnnnnnnnnnnnnnnnnnnnnnnnnnnnnnnnnnnnnnnnnnnnnnnnnnnnnnnnnnnnnnnnnnnnnnnnnnnnnnnnnnnnnnnnnnnnnnnnnnnnnnnnnnnnnnnnnnnnnnnnnnnnnnnnnnnnnnnnnnnnnnnnnnnnnnnnnnnnnnnnnnnnnnnnnnnnnnnnnnnnnnnnnnnnnnnnnnnnnnnnnnnnnnnnnnnnnnnnnnnnnnnnnnnnnnnnnnnnnnnnnnnnnnnnnnnnnnnnnnnnnnnnnnnnnnnnnnnnnnnnnnnnnnnnnnnnnnnnnnnnnnnnnnnnnnnnnnnnnnnnnnnnnnnnnnnnnnnnnnnnnnnnnnnnnnnnnnnnnnnnnnnnnnnnnnnnnnnnnnnnnnnnnnnnnnnnnnnnnnnnnnnnnnnnnnnnnnnnnnnnnnnnnnnnnnnnnnnnnnnnnnnnnnnnnnnnnnnnnnnnnnnnnnnnnnnnnnnnnnnnnnnnnnnnnnnnnnnnnnnnnnnnnnnnnnnnnnnnnnnnnnnnnnnnnnnnnnnnnnnnnnnnnnnnnnnnnnnnnnnnnnnnnnnnnnnnnnnnnnnnnnnnnnnnnnnnnnnnnnnnnnnnnnnnnnnnnnnnnnnnnnnnnnnnnnnnnnnnnnnnnnnnnnnnnnnnnnnnnnnnnnnnnnnnnnnnnnnnnnnnnnnnnnnnnnnnnnnnnnnnnnnnnnnnnnnnnnnnnnnnnnnnnnnnnnnnnnnnnnnnnnnnnnnnnnnnnnnnnnnnnnnnnnnnnnnnnnnnnnnnnnnnnnnnnnnnnnnnnnnnnnnnnnnnnnnnnnnnnnnnnnnnnnnnnnnnnnnnnnnnnnnnnnnnnnnnnnnnnnnnnnnnnnnnnnnnnnnnnnnnnnnnnnnnnnnnnnnnnnnnnnnnnnnnnnnnnnnnnnnnnnnnnnnnnnnnnnnnnnnnnnnnnnnnnnnnnnnnnnnnnnnnnnnnnnnnnnnnnnnnnnnnnnnnnnnnnnnnnnnnnnnnnnnnnnnnnnnnnnnnnnnnnnnnnnnnnnnnnnnnnnnnnnnnnnnnnnnnnnnnnnnnnnnnnnnnnnnnnnnnnnnnnnnnnnnnnnnnnnnnnnnnnnnnnnnnnnnnnnnnnnnnnnnnnnnnnnnnnnnnnnnnnnnnnnnnnnnnnnnnnnnnnnnnnnnnnnnnnnnnnnnnnnnnnnnnnnnnnnnnnnnnnnnnnnnnnnnnnnnnnnnnnnnnnnnnnnnnnnnnnnnnnnnnnnnnnnnnnnnnnnnnnnnnnnnnnnnnnnnnnnnnnnnnnnnnnnnnnnnnnnnnnnnnnnnnnnnnnnnnnnnnnnnnnnnnnnnnnnnnnnnnnnnnnnnnnnnnnnnnnnnnnnnnnnnnnnnnnnnnnnnnnnnnnnnnnnnnnnnnnnnnnnnnnnnnnnnnnnnnnnnnnnnnnnnnnnnnnnnnnnnnnnnnnnnnnnnnnnnnnnnnnnnnnnnnnnnnnnnnnnnnnnnnnnnnnnnnnnnnnnnnnnnnnnnnnnnnnnnnnnnnnnnnnnnnnnnnnnnnnnnnnnnnnnnnnnnnnnnnnnnnnnnnnnnnnnnnnnnnnnnnnnnnnnnnnnnnnnnnnnnnnnnnnnnnnnnnnnnnnnnnnnnnnnnnnnnnnnnnnnnnnnnnnnnnnnnnnnnnnnnnnnnnnnnnnnnnnnnnnnnnnnnnnnnnnnnnnnnnnnnnnnnnnnnnnnnnnnnnnnnnnnnnnnnnnnnnnnnnnnnnnnnnnnnnnnnnnnnnnnnnnnnnnnnnnnnnnnnnnnnnnnnnnnnnnnnnnnnnnnnnnnnnnnnnnnnnnnnnnnnnnnnnnnnnnnnnnnnnnnnnnnnnnnnnnnnnnnnnnnnnnnnnnnnnnnnnnnnnnnnnnnnnnnnnnnnnnnnnnnnnnnnnnnnnnnnnnnnnnnnnnnnnnnnnnnnnnnnnnnnnnnnnnnnnnnnnnnnnnnnnnnnnnnnnnnnnnnnnnnnnnnnnnnnnnnnnnnnnnnnnnnnnnnnnnnnnnnnnnnnnnnnnnnnnnnnnnnnnnnnnnnnnnnnnnnnnnnnnnnnnnnnnnnnnnnnnnnnnnnnnnnnnnnnnnnnnnnnnnnnnnnnnnnnnnnnnnnnnnnnnnnnnnnnnnnnnnnnnnnnnnnnnnnnnnnnnnnnnnnnnnnnnnnnnnnnnnnnnnnnnnnnnnnnnnnnnnnnnnnnnnnnnnnnnnnnnnnnnnnnnnnnnnnnnnnnnnnnnnnnnnnnnnnnnnnnnnnnnnnnnnnnnnnnnnnnnnnnnnnnnnnnnnnnnnnnnnnnnnnnnnnnnnnnnnnnnnnnnnnnnnnnnnnnnnnnnnnnnnnnnnnnnnnnnnnnnnnnnnnnnnnnnnnnnnnnnnnnnnnnnnnnnnnnnnnnnnnnnnnnnnnnnnnnnnnnnnnnnnnnnnnnnnnnnnnnnnnnnnnnnnnnnnnnnnnnnnnnnnnnnnnnnnnnnnnnnnnnnnnnnnnnnnnnnnnnnnnnnnnnnnnnnnnnnnnnnnnnnnnnnnnnnnnnnnnnnnnnnnnnnnnnnnnnnnnnnnnnnnnnnnnnnnnnnnnnnnnnnnnnnnnnnnnnnnnnnnnnnnnnnnnnnnnnnnnnnnnnnnnnnnnnnnnnnnnnnnnnnnnnnnnnnnnnnnnnnnnnnnnnnnnnnnnnnnnnnnnnnnnnnnnnnnnnnnnnnnnnnnnnnnnnnnnnnnnnnnnnnnnnnnnnnnnnnnnnnnnnnnnnnnnnnnnnnnnnnnnnnnnnnnnnnnnnnnnnnnnnnnnnnnnnnnnnnnnnnnnnnnnnnnnnnnnnnnnnnnnnnnnnnnnnnnnnnnnnnnnnnnnnnnnnnnnnnnnnnnnnnnnnnnnnnnnnnnnnnnnnnnnnnnnnnnnnnnnnnnnnnnnnnnnnnnnnnnnnnnnnnnnnnnnnnnnnnnnnnnnnnnnnnnnnnnnnnnnnnnnnnnnnnnnnnnnnnnnnnnnnnnnnnnnnnnnnnnnnnnnnnnnnnnnnnnnnnnnnnnnnnnnnnnnnnnnnnnnnnnnnnnnnnnnnnnnnnnnnnnnnnnnnnnnnnnnnnnnnnnnnnnnnnnnnnnnnnnnnnnnnnnnnnnnnnnnnnnnnnnnnnnnnnnnnnnnnnnnnnnnnnnnnnnnnnnnnnnnnnnnnnnnnnnnnnnnnnnnnnnnnnnnnnnnnnnnnnnnnnnnnnnnnnnnnnnnnnnnnnnnnnnnnnnnnnnnnnnnnnnnnnnnnnnnnnnnnnnnnnnnnnnnnnnnnnnnnnnnnnnnnnnnnnnnnnnnnnnnnnnnnnnnnnnnnnnnnnnnnnnnnnnnnnnnnnnnnnnnnnnnnnnnnnnnnnnnnnnnnnnnnnnnnnnnnnnnnnnnnnnnnnnnnnnnnnnnnnnnnnnnnnnnnnnnnnnnnnnnnnnnnnnnnnnnnnnnnnnnnnnnnnnnnnnnnnnnnnnnnnnnnnnnnnnnnnnnnnnnnnnnnnnnnnnnnnnnnnnnnnnnnnnnnnnnnnnnnnnnnnnnnnnnnnnnnnnnnnnnnnnnnnnnnnnnnnnnnnnnnnnnnnnnnnnnnnnnnnnnnnnnnnnnnnnnnnnnnnnnnnnnnnnnnnnnnnnnnnnnnnnnnnnnnnnnnnnnnnnnnnnnnnnnnnnnnnnnnnnnnnnnnnnnnnnnnnnnnnnnnnnnnnnnnnnnnnnnnnnnnnnnnnnnnnnnnnnnnnnnnnnnnnnnnnnnnnnnnnnnnnnnnnnnnnnnnnnnnnnnnnnnnnnnnnnnnnnnnnnnnnnnnnnnnnnnnnnnnnnnnnnnnnnnnnnnnnnnnnnnnnnnnnnnnnnnnnnnnnnnnnnnnnnnnnnnnnnnnnnnnnnnnnnnnnnnnnnnnnnnnnnnnnnnnnnnnnnnnnnnnnnnnnnnnnnnnnnnnnnnnnnnnnnnnnnnnnnnnnnnnnnnnnnnnnnnnnnnnnnnnnnnnnnnnnnnnnnnnnnnnnnnnnnnnnnnnnnnnnnnnnnnnnnnnnnnnnnnnnnnnnnnnnnnnnnnnnnnnnnnnnnnnnnnnnnnnnnnnnnnnnnnnnnnnnnnnnnnnnnnnnnnnnnnnnnnnnnnnnnnnnnnnnnnnnnnnnnnnnnnnnnnnnnnnnnnnnnnnnnnnnnnnnnnnnnnnnnnnnnnnnnnnnnnnnnnnnnnnnnnnnnnnnnnnnnnnnnnnnnnnnnnnnnnnnnnnnnnnnnnnnnnnnnnnnnnnnnnnnnnnnnnnnnnnnnnnnnnnnnnnnnnnnnnnnnnnnnnnnnnnnnnnnnnnnnnnnnnnnnnnnnnnnnnnnnnnnnnnnnnnnnnnnnnnnnnnnnnnnnnnnnnnnnnnnnnnnnnnnnnnnnnnnnnnnnnnnnnnnnnnnnnnnnnnnnnnnnnnnnnnnnnnnnnnnnnnnnnnnnnnnnnnnnnnnnnnnnnnnnnnnnnnnnnnnnnnnnnnnnnnnnnnnnnnnnnnnnnnnnnnnnnnnnnnnnnnnnnnnnnnnnnnnnnnnnnnnnnnnnnnnnnnnnnnnnnnnnnnnnnnnnnnnnnnnnnnnnnnnnnnnnnnnnnnnnnnnnnnnnnnnnnnnnnnnnnnnnnnnnnnnnnnnnnnnnnnnnnnnnnnnnnnnnnnnnnnnnnnnnnnnnnnnnnnnnnnnnnnnnnnnnnnnnnnnnnnnnnnnnnnnnnnnnnnnnnnnnnnnnnnnnnnnnnnnnnnnnnnnnnnnnnnnnnnnnnnnnnnnnnnnnnnnnnnnnnnnnnnnnnnnnnnnnnnnnnnnnnnnnnnnnnnnnnnnnnnnnnnnnnnnnnnnnnnnnnnnnnnnnnnnnnnnnnnnnnnnnnnnnnnnnnnnnnnnnnnnnnnnnnnnnnnnnnnnnnnnnnnnnnnnnnnnnnnnnnnnnnnnnnnnnnnnnnnnnnnnnnnnnnnnnnnnnnnnnnnnnnnnnnnnnnnnnnnnnnnnnnnnnnnnnnnnnnnnnnnnnnnnnnnnnnnnnnnnnnnnnnnnnnnnnnnnnnnnnnnnnnnnnnnnnnnnnnnnnnnnnnnnnnnnnnnnnnnnnnnnnnnnnnnnnnnnnnnnnnnnnnnnnnnnnnnnnnnnnnnnnnnnnnnnnnnnnnnnnnnnnnnnnnnnnnnnnnnnnnnnnnnnnnnnnnnnnnnnnnnnnnnnnnnnnnnnnnnnnnnnnnnnnnnnnnnnnnnnnnnnnnnnnnnnnnnnnnnnnnnnnnnnnnnnnnnnnnnnnnnnnnnnnnnnnnnnnnnnnnnnnnnnnnnnnnnnnnnnnnnnnnnnnnnnnnnnnnnnnnnnnnnnnnnnnnnnnnnnnnnnnnnnnnnnnnnnnnnnnnnnnnnnnnnnnnnnnnnnnnnnnnnnnnnnnnnnnnnnnnnnnnnnnnnnnnnnnnnnnnnnnnnnnnnnnnnnnnnnnnnnnnnnnnnnnnnnnnnnnnnnnnnnnnnnnnnnnnnnnnnnnnnnnnnnnnnnnnnnnnnnnnnnnnnnnnnnnnnnnnnnnnnnnnnnnnnnnnnnnnnnnnnnnnnnnnnnnnnnnnnnnnnnnnnnnnnnnnnnnnnnnnnnnnnnnnnnnnnnnnnnnnnnnnnnnnnnnnnnnnnnnnnnnnnnnnnnnnnnnnnnnnnnnnnnnnnnnnnnnnnnnnnnnnnnnnnnnnnnnnnnnnnnnnnnnnnnnnnnnnnnnnnnnnnnnnnnnnnnnnnnnnnnnnnnnnnnnnnnnnnnnnnnnnnnnnnnnnnnnnnnnnnnnnnnnnnnnnnnnnnnnnnnnnnnnnnnnnnnnnnnnnnnnnnnnnnnnnnnnnnnnnnnnnnnnnnnnnnnnnnnnnnnnnnnnnnnnnnnnnnnnnnnnnnnnnnnnnnnnnnnnnnnnnnnnnnnnnnnnnnnnnnnnnnnnnnnnnnnnnnnnnnnnnnnnnnnnnnnnnnnnnnnnnnnnnnnnnnnnnnnnnnnnnnnnnnnnnnnnnnnnnnnnnnnnnnnnnnnnnnnnnnnnnnnnnnnnnnnnnnnnnnnnnnnnnnnnnnnnnnnnnnnnnnnnnnnnnnnnnnnnnnnnnnnnnnnnnnnnnnnnnnnnnnnnnnnnnnnnnnnnnnnnnnnnnnnnnnnnnnnnnnnnnnnnnnnnnnnnnnnnnnnnnnnnnnnnnnnnnnnnnnnnnnnnnnnnnnnnnnnnnnnnnnnnnnnnnnnnnnnnnnnnnnnnnnnnnnnnnnnnnnnnnnnnnnnnnnnnnnnnnnnnnnnnnnnnnnnnnnnnnnnnnnnnnnnnnnnnnnnnnnnnnnnnnnnnnnnnnnnnnnnnnnnnnnnnnnnnnnnnnnnnnnnnnnnnnnnnnnnnnnnnnnnnnnnnnnnnnnnnnnnnnnnnnnnnnnnnnnnnnnnnnnnnnnnnnnnnnnnnnnnnnnnnnnnnnnnnnnnnnnnnnnnnnnnnnnnnnnnnnnnnnnnnnnnnnnnnnnnnnnnnnnnnnnnnnnnnnnnnnnnnnnnnnnnnnnnnnnnnnnnnnnnnnnnnnnnnnnnnnnnnnnnnnnnnnnnnnnnnnnnnnnnnnnnnnnnnnnnnnnnnnnnnnnnnnnnnnnnnnnnnnnnnnnnnnnnnnnnnnnnnnnnnnnnnnnnnnnnnnnnnnnnnnnnnnnnnnnnnnnnnnnnnnnnnnnnnnnnnnnnnnnnnnnnnnnnnnnnnnnnnnnnnnnnnnnnnnnnnnnnnnnnnnnnnnnnnnnnnnnnnnnnnnnnnnnnnnnnnnnnnnnnnnnnnnnnnnnnnnnnnnnnnnnnnnnnnnnnnnnnnnnnnnnnnnnnnnnnnnnnnnnnnnnnnnnnnnnnnnnnnnnnnnnnnnnnnnnnnnnnnnnnnnnnnnnnnnnnnnnnnnnnnnnnnnnnnnnnnnnnnnnnnnnnnnnnnnnnnnnnnnnnnnnnnnnnnnnnnnnnnnnnnnnnnnnnnnnnnnnnnnnnnnnnnnnnnnnnnnnnnnnnnnnnnnnnnnnnnnnnnnnnnnnnnnnnnnnnnnnnnnnnnnnnnnnnnnnnnnnnnnnnnnnnnnnnnnnnnnnnnnnnnnnnnnnnnnnnnnnnnnnnnnnnnnnnnnnnnnnnnnnnnnnnnnnnnnnnnnnnnnnnnnnnnnnnnnnnnnnnnnnnnnnnnnnnnnnnnnnnnnnnnnnnnnnnnnnnnnnnnnnnnnnnnnnnnnnnnnnnnnnnnnnnnnnnnnnnnnnnnnnnnnnnnnnnnnnnnnnnnnnnnnnnnnnnnnnnnnnnnnnnnnnnnnnnnnnnnnnnnnnnnnnnnnnnnnnnnnnnnnnnnnnnnnnnnnnnnnnnnnnnnnnnnnnnnnnnnnnnnnnnnnnnnnnnnnnnnnnnnnnnnnnnnnnnnnnnnnnnnnnnnnnnnnnnnnnnnnnnnnnnnnnnnnnnnnnnnnnnnnnnnnnnnnnnnnnnnnnnnnnnnnnnnnnnnnnnnnnnnnnnnnnnnnnnnnnnnnnnnnnnnnnnnnnnnnnnnnnnnnnnnnnnnnnnnnnnnnnnnnnnnnnnnnnnnnnnnnnnnnnnnnnnnnnnnnnnnnnnnnnnnnnnnnnnnnnnnnnnnnnnnnnnnnnnnnnnnnnnnnnnnnnnnnnnnnnnnnnnnnnnnnnnnnnnnnnnnnnnnnnnnnnnnnnnnnnnnnnnnnnnnnnnnnnnnnnnnnnnnnnnnnnnnnnnnnnnnnnnnnnnnnnnnnnnnnnnnnnnnnnnnnnnnnnnnnnnnnnnnnnnnnnnnnnnnnnnnnnnnnnnnnnnnnnnnnnnnnnnnnnnnnnnnnnnnnnnnnnnnnnnnnnnnnnnnnnnnnnnnnnnnnnnnnnnnnnnnnnnnnnnnnnnnnnnnnnnnnnnnnnnnnnnnnnnnnnnnnnnnnnnnnnnnnnnnnnnnnnnnnnnnnnnnnnnnnnnnnnnnnnnnnnnnnnnnnnnnnnnnnnnnnnnnnnnnnnnnnnnnnnnnnnnnnnnnnnnnnnnnnnnnnnnnnnnnnnnnnnnnnnnnnnnnnnnnnnnnnnnnnnnnnnnnnnnnnnnnnnnnnnnnnnnnnnnnnnnnnnnnnnnnnnnnnnnnnnnnnnnnnnnnnnnnnnnnnnnnnnnnnnnnnnnnnnnnnnnnnnnnnnnnnnnnnnnnnnnnnnnnnnnnnnnnnnnnnnnnnnnnnnnnnnnnnnnnnnnnnnnnnnnnnnnnnnnnnnnnnnnnnnnnnnnnnnnnnnnnnnnnnnnnnnnnnnnnnnnnnnnnnnnnnnnnnnnnnnnnnnnnnnnnnnnnnnnnnnnnnnnnnnnnnnnnnnnnnnnnnnnnnnnnnnnnnnnnnnnnnnnnnnnnnnnnnnnnnnnnnnnnnnnnnnnnnnnnnnnnnnnnnnnnnnnnnnnnnnnnnnnnnnnnnnnnnnnnnnnnnnnnnnnnnnnnnnnnnnnnnnnnnnnnnnnnnnnnnnnnnnnnnnnnnnnnnnnnnnnnnnnnnnnnnnnnnnnnnnnnnnnnnnnnnnnnnnnnnnnnnnnnnnnnnnnnnnnnnnnnnnnnnnnnnnnnnnnnnnnnnnnnnnnnnnnnnnnnnnnnnnnnnnnnnnnnnnnnnnnnnnnnnnnnnnnnnnnnnnnnnnnnnnnnnnnnnnnnnnnnnnnnnnnnnnnnnnnnnnnnnnnnnnnnnnnnnnnnnnnnnnnnnnnnnnnnnnnnnnnnnnnnnnnnnnnnnnnnnnnnnnnnnnnnnnnnnnnnnnnnnnnnnnnnnnnnnnnnnnnnnnnnnnnnnnnnnnnnnnnnnnnnnnnnnnnnnnnnnnnnnnnnnnnnnnnnnnnnnnnnnnnnnnnnnnnnnnnnnnnnnnnnnnnnnnnnnnnnnnnnnnnnnnnnnnnnnnnnnnnnnnnnnnnnnnnnnnnnnnnnnnnnnnnnnnnnnnnnnnnnnnnnnnnnnnnnnnnnnnnnnnnnnnnnnnnnnnnnnnnnnnnnnnnnnnnnnnnnnnnnnnnnnnnnnnnnnnnnnnnnnnnnnnnnnnnnnnnnnnnnnnnnnnnnnnnnnnnnnnnnnnnnnnnnnnnnnnnnnnnnnnnnnnnnnnnnnnnnnnnnnnnnnnnnnnnnnnnnnnnnnnnnnnnnnnnnnnnnnnnnnnnnnnnnnnnnnnnnnnnnnnnnnnnnnnnnnnnnnnnnnnnnnnnnnnnnnnnnnnnnnnnnnnnnnnnnnnnnnnnnnnnnnnnnnnnnnnnnnnnnnnnnnnnnnnnnnnnnnnnnnnnnnnnnnnnnnnnnnnnnnnnnnnnnnnnnnnnnnnnnnnnnnnnnnnnnnnnnnnnnnnnnnnnnnnnnnnnnnnnnnnnnnnnnnnnnnnnnnnnnnnnnnnnnnnnnnnnnnnnnnnnnnnnnnnnnnnnnnnnnnnnnnnnnnnnnnnnnnnnnnnnnnnnnnnnnnnnnnnnnnnnnnnnnnnnnnnnnnnnnnnnnnnnnnnnnnnnnnnnnnnnnnnnnnnnnnnnnnnnnnnnnnnnnnnnnnnnnnnnnnnnnnnnnnnnnnnnnnnnnnnnnnnnnnnnnnnnnnnnnnnnnnnnnnnnnnnnnnnnnnnnnnnnnnnnnnnnnnnnnnnnnnnnnnnnnnnnnnnnnnnnnnnnnnnnnnnnnnnnnnnnnnnnnnnnnnnnnnnnnnnnnnnnnnnnnnnnnnnnnnnnnnnnnnnnnnnnnnnnnnnnnnnnnnnnnnnnnnnnnnnnnnnnnnnnnnnnnnnnnnnnnnnnnnnnnnnnnnnnnnnnnnnnnnnnnnnnnnnnnnnnnnnnnnnnnnnnnnnnnnnnnnnnnnnnnnnnnnnnnnnnnnnnnnnnnnnnnnnnnnnnnnnnnnnnnnnnnnnnnnnnnnnnnnnnnnnnnnnnnnnnnnnnnnnnnnnnnnnnnnnnnnnnnnnnnnnnnnnnnnnnnnnnnnnnnnnnnnnnnnnnnnnnnnnnnnnnnnnnnnnnnnnnnnnnnnnnnnnnnnnnnnnnnnnnnnnnnnnnnnnnnnnnnnnnnnnnnnnnnnnnnnnnnnnnnnnnnnnnnnnnnnnnnnnnnnnnnnnnnnnnnnnnnnnnnnnnnnnnnnnnnnnnnnnnnnnnnnnnnnnnnnnnnnnnnnnnnnnnnnnnnnnnnnnnnnnnnnnnnnnnnnnnnnnnnnnnnnnnnnnnnnnnnnnnnnnnnnnnnnnnnnnnnnnnnnnnnnnnnnnnnnnnnnnnnnnnnnnnnnnnnnnnnnnnnnnnnnnnnnnnnnnnnnnnnnnnnnnnnnnnnnnnnnnnnnnnnnnnnnnnnnnnnnnnnnnnnnnnnnnnnnnnnnnnnnnnnnnnnnnnnnnnnnnnnnnnnnnnnnnnnnnnnnnnnnnnnnnnnnnnnnnnnnnnnnnnnnnnnnnnnnnnnnnnnnnnnnnnnnnnnnnnnnnnnnnnnnnnnnnnnnnnnnnnnnnnnnnnnnnnnnnnnnnnnnnnnnnnnnnnnnnnnnnnnnnnnnnnnnnnnnnnnnnnnnnnnnnnnnnnnnnnnnnnnnnnnnnnnnnnnnnnnnnnnnnnnnnnnnnnnnnnnnnnnnnnnnnnnnnnnnnnnnnnnnnnnnnnnnnnnnnnnnnnnnnnnnnnnnnnnnnnnnnnnnnnnnnnnnnnnnnnnnnnnnnnnnnnnnnnnnnnnnnnnnnnnnnnnnnnnnnnnnnnnnnnnnnnnnnnnnnnnnnnnnnnnnnnnnnnnnnnnnnnnnnnnnnnnnnnnnnnnnnnnnnnnnnnnnnnnnnnnnnnnnnnnnnnnnnnnnnnnnnnnnnnnnnnnnnnnnnnnnnnnnnnnnnnnnnnnnnnnnnnnnnnnnnnnnnnnnnnnnnnnnnnnnnnnnnnnnnnnnnnnnnnnnnnnnnnnnnnnnnnnnnnnnnnnnnnnnnnnnnnnnnnnnnnnnnnnnnnnnnnnnnnnnnnnnnnnnnnnnnnnnnnnnnnnnnnnnnnnnnnnnnnnnnnnnnnnnnnnnnnnnnnnnnnnnnnnnnnnnnnnnnnnnnnnnnnnnnnnnnnnnnnnnnnnnnnnnnnnnnnnnnnnnnnnnnnnnnnnnnnnnnnnnnnnnnnnnnnnnnnnnnnnnnnnnnnnnnnnnnnnnnnnnnnnnnnnnnnnnnnnnnnnnnnnnnnnnnnnnnnnnnnnnnnnnnnnnnnnnnnnnnnnnnnnnnnnnnnnnnnnnnnnnnnnnnnnnnnnnnnnnnnnnnnnnnnnnnnnnnnnnnnnnnnnnnnnnnnnnnnnnnnnnnnnnnnnnnnnnnnnnnnnnnnnnnnnnnnnnnnnnnnnnnnnnnnnnnnnnnnnnnnnnnnnnnnnnnnnnnnnnnnnnnnnnnnnnnnnnnnnnnnnnnnnnnnnnnnnnnnnnnnnnnnnnnnnnnnnnnnnnnnnnnnnnnnnnnnnnnnnnnnnnnnnnnnnnnnnnnnnnnnnnnnnnnnnnnnnnnnnnnnnnnnnnnnnnnnnnnnnnnnnnnnnnnnnnnnnnnnnnnnnnnnnnnnnnnnnnnnnnnnnnnnnnnnnnnnnnnnnnnnnnnnnnnnnnnnnnnnnnnnnnnnnnnnnnnnnnnnnnnnnnnnnnnnnnnnnnnnnnnnnnnnnnnnnnnnnnnnnnnnnnnnnnnnnnnnnnnnnnnnnnnnnnnnnnnnnnnnnnnnnnnnnnnnnnnnnnnnnnnnnnnnnnnnnnnnnnnnnnnnnnnnnnnnnnnnnnnnnnnnnnnnnnnnnnnnnnnnnnnnnnnnnnnnnnnnnnnnnnnnnnnnnnnnnnnnnnnnnnnnnnnnnnnnnnnnnnnnnnnnnnnnnnnnnnnnnnnnnnnnnnnnnnnnnnnnnnnnnnnnnnnnnnnnnnnnnnnnnnnnnnnnnnnnnnnnnnnnnnnnnnnnnnnnnnnnnnnnnnnnnnnnnnnnnnnnnnnnnnnnnnnnnnnnnnnnnnnnnnnnnnnnnnnnnnnnnnnnnnnnnnnnnnnnnnnnnnnnnnnnnnnnnnnnnnnnnnnnnnnnnnnnnnnnnnnnnnnnnnnnnnnnnnnnnnnnnnnnnnnnnnnnnnnnnnnnnnnnnnnnnnnnnnnnnnnnnnnnnnnnnnnnnnnnnnnnnnnnnnnnnnnnnnnnnnnnnnnnnnnnnnnnnnnnnnnnnnnnnnnnnnnnnnnnnnnnnnnnnnnnnnnnnnnnnnnnnnnnnnnnnnnnnnnnnnnnnnnnnnnnnnnnnnnnnnnnnnnnnnnnnnnnnnnnnnnnnnnnnnnnnnnnnnnnnnnnnnnnnnnnnnnnnnnnnnnnnnnnnnnnnnnnnnnnnnnnnnnnnnnnnnnnnnnnnnnnnnnnnnnnnnnnnnnnnnnnnnnnnnnnnnnnnnnnnnnnnnnnnnnnnnnnnnnnnnnnnnnnnnnnnnnnnnnnnnnnnnnnnnnnnnnnnnnnnnnnnnnnnnnnnnnnnnnnnnnnnnnnnnnnnnnnnnnnnnnnnnnnnnnnnnnnnnnnnnnnnnnnnnnnnnnnnnnnnnnnnnnnnnnnnnnnnnnnnnnnnnnnnnnnnnnnnnnnnnnnnnnnnnnnnnnnnnnnnnnnnnnnnnnnnnnnnnnnnnnnnnnnnnnnnnnnnnnnnnnnnnnnnnnnnnnnnnnnnnnnnnnnnnnnnnnnnnnnnnnnnnnnnnnnnnnnnnnnnnnnnnnnnnnnnnnnnnnnnnnnnnnnnnnnnnnnnnnnnnnnnnnnnnnnnnnnnnnnnnnnnnnnnnnnnnnnnnnnnnnnnnnnnnnnnnnnnnnnnnnnnnnnnnnnnnnnnnnnnnnnnnnnnnnnnnnnnnnnnnnnnnnnnnnnnnnnnnnnnnnnnnnnnnnnnnnnnnnnnnnnnnnnnnnnnnnnnnnnnnnnnnnnnnnnnnnnnnnnnnnnnnnnnnnnnnnnnnnnnnnnnnnnnnnnnnnnnnnnnnnnnnnnnnnnnnnnnnnnnnnnnnnnnnnnnnnnnnnnnnnnnnnnnnnnnnnnnnnnnnnnnnnnnnnnnnnnnnnnnnnnnnnnnnnnnnnnnnnnnnnnnnnnnnnnnnnnnnnnnnnnnnnnnnnnnnnnnnnnnnnnnnnnnnnnnnnnnnnnnnnnnnnnnnnnnnnnnnnnnnnnnnnnnnnnnnnnnnnnnnnnnnnnnnnnnnnnnnnnnnnnnnnnnnnnnnnnnnnnnnnnnnnnnnnnnnnnnnnnnnnnnnnnnnnnnnnnnnnnnnnnnnnnnnnnnnnnnnnnnnnnnnnnnnnnnnnnnnnnnnnnnnnnnnnnnnnnnnnnnnnnnnnnnnnnnnnnnnnnnnnnnnnnnnnnnnnnnnnnnnnnnnnnnnnnnnnnnnnnnnnnnnnnnnnnnnnnnnnnnnnnnnnnnnnnnnnnnnnnnnnnnnnnnnnnnnnnnnnnnnnnnnnnnnnnnnnnnnnnnnnnnnnnnnnnnnnnnnnnnnnnnnnnnnnnnnnnnnnnnnnnnnnnnnnnnnnnnnnnnnnnnnnnnnnnnnnnnnnnnnnnnnnnnnnnnnnnnnnnnnnnnnnnnnnnnnnnnnnnnnnnnnnnnnnnnnnnnnnnnnnnnnnnnnnnnnnnnnnnnnnnnnnnnnnnnnnnnnnnnnnnnnnnnnnnnnnnnnnnnnnnnnnnnnnnnnnnnnnnnnnnnnnnnnnnnnnnnnnnnnnnnnnnnnnnnnnnnnnnnnnnnnnnnnnnnnnnnnnnnnnnnnnnnnnnnnnnnnnnnnnnnnnnnnnnnnnnnnnnnnnnnnnnnnnnnnnnnnnnnnnnnnnnnnnnnnnnnnnnnnnnnnnnnnnnnnnnnnnnnnnnnnnnnnnnnnnnnnnnnnnnnnnnnnnnnnnnnnnnnnnnnnnnnnnnnnnnnnnnnnnnnnnnnnnnnnnnnnnnnnnnnnnnnnnnnnnnnnnnnnnnnnnnnnnnnnnnnnnnnnnnnnnnnnnnnnnnnnnnnnnnnnnnnnnnnnnnnnnnnnnnnnnnnnnnnnnnnnnnnnnnnnnnnnnnnnnnnnnnnnnnnnnnnnnnnnnnnnnnnnnnnnnnnnnnnnnnnnnnnnnnnnnnnnnnnnnnnnnnnnnnnnnnnnnnnnnnnnnnnnnnnnnnnnnnnnnnnnnnnnnnnnnnnnnnnnnnnnnnnnnnnnnnnnnnnnnnnnnnnnnnnnnnnnnnnnnnnnnnnnnnnnnnnnnnnnnnnnnnnnnnnnnnnnnnnnnnnnnnnnnnnnnnnnnnnnnnnnnnnnnnnnnnnnnnnnnnnnnnnnnnnnnnnnnnnnnnnnnnnnnnnnnnnnnnnnnnnnnnnnnnnnnnnnnnnnnnnnnnnnnnnnnnnnnnnnnnnnnnnnnnnnnnnnnnnnnnnnnnnnnnnnnnnnnnnnnnnnnnnnnnnnnnnnnnnnnnnnnnnnnnnnnnnnnnnnnnnnnnnnnnnnnnnnnnnnnnnnnnnnnnnnnnnnnnnnnnnnnnnnnnnnnnnnnnnnnnnnnnnnnnnnnnnnnnnnnnnnnnnnnnnnnnnnnnnnnnnnnnnnnnnnnnnnnnnnnnnnnnnnnnnnnnnnnnnnnnnnnnnnnnnnnnnnnnnnnnnnnnnnnnnnnnnnnnnnnnnnnnnnnnnnnnnnnnnnnnnnnnnnnnnnnnnnnnnnnnnnnnnnnnnnnnnnnnnnnnnnnnnnnnnnnnnnnnnnnnnnnnnnnnnnnnnnnnnnnnnnnnnnnnnnnnnnnnnnnnnnnnnnnnnnnnnnnnnnnnnnnnnnnnnnnnnnnnnnnnnnnnnnnnnnnnnnnnnnnnnnnnnnnnnnnnnnnnnnnnnnnnnnnnnnnnnnnnnnnnnnnnnnnnnnnnnnnnnnnnnnnnnnnnnnnnnnnnnnnnnnnnnnnnnnnnnnnnnnnnnnnnnnnnnnnnnnnnnnnnnnnnnnnnnnnnnnnnnnnnnnnnnnnnnnnnnnnnnnnnnnnnnnnnnnnnnnnnnnnnnnnnnnnnnnnnnnnnnnnnnnnnnnnnnnnnnnnnnnnnnnnnnnnnnnnnnnnnnnnnnnnnnnnnnnnnnnnnnnnnnnnnnnnnnnnnnnnnnnnnnnnnnnnnnnnnnnnnnnnnnnnnnnnnnnnnnnnnnnnnnnnnnnnnnnnnnnnnnnnnnnnnnnnnnnnnnnnnnnnnnnnnnnnnnnnnnnnnnnnnnnnnnnnnnnnnnnnnnnnnnnnnnnnnnnnnnnnnnnnnnnnnnnnnnnnnnnnnnnnnnnnnnnnnnnnnnnnnnnnnnnnnnnnnnnnnnnnnnnnnnnnnnnnnnnnnnnnnnnnnnnnnnnnnnnnnnnnnnnnnnnnnnnnnnnnnnnnnnnnnnnnnnnnnnnnnnnnnnnnnnnnnnnnnnnnnnnnnnnnnnnnnnnnnnnnnnnnnnnnnnnnnnnnnnnnnnnnnnnnnnnnnnnnnnnnnnnnnnnnnnnnnnnnnnnnnnnnnnnnnnnnnnnnnnnnnnnnnnnnnnnnnnnnnnnnnnnnnnnnnnnnnnnnnnnnnnnnnnnnnnnnnnnnnnnnnnnnnnnnnnnnnnnnnnnnnnnnnnnnnnnnnnnnnnnnnnnnnnnnnnnnnnnnnnnnnnnnnnnnnnnnnnnnnnnnnnnnnnnnnnnnnnnnnnnnnnnnnnnnnnnnnnnnnnnnnnnnnnnnnnnnnnnnnnnnnnnnnnnnnnnnnnnnnnnnnnnnnnnnnnnnnnnnnnnnnnnnnnnnnnnnnnnnnnnnnnnnnnnnnnnnnnnnnnnnnnnnnnnnnnnnnnnnnnnnnnnnnnnnnnnnnnnnnnnnnnnnnnnnnnnnnnnnnnnnnnnnnnnnnnnnnnnnnnnnnnnnnnnnnnnnnnnnnnnnnnnnnnnnnnnnnnnnnnnnnnnnnnnnnnnnnnnnnnnnnnnnnnnnnnnnnnnnnnnnnnnnnnnnnnnnnnnnnnnnnnnnnnnnnnnnnnnnnnnnnnnnnnnnnnnnnnnnnnnnnnnnnnnnnnnnnnnnnnnnnnnnnnnnnnnnnnnnnnnnnnnnnnnnnnnnnnnnnnnnnnnnnnnnnnnnnnnnnnnnnnnnnnnnnnnnnnnnnnnnnnnnnnnnnnnnnnnnnnnnnnnnnnnnnnnnnnnnnnnnnnnnnnnnnnnnnnnnnnnnnnnnnnnnnnnnnnnnnnnnnnnnnnnnnnnnnnnnnnnnnnnnnnnnnnnnnnnnnnnnnnnnnnnnnnnnnnnnnnnnnnnnnnnnnnnnnnnnnnnnnnnnnnnnnnnnnnnnnnnnnnnnnnnnnnnnnnnnnnnnnnnnnnnnnnnnnnnnnnnnnnnnnnnnnnnnnnnnnnnnnnnnnnnnnnnnnnnnnnnnnnnnnnnnnnnnnnnnnnnnnnnnnnnnnnnnnnnnnnnnnnnnnnnnnnnnnnnnnnnnnnnnnnnnnnnnnnnnnnnnnnnnnnnnnnnnnnnnnnnnnnnnnnnnnnnnnnnnnnnnnnnnnnnnnnnnnnnnnnnnnnnnnnnnnnnnnnnnnnnnnnnnnnnnnnnnnnnnnnnnnnnnnnnnnnnnnnnnnnnnnnnnnnnnnnnnnnnnnnnnnnnnnnnnnnnnnnnnnnnnnnnnnnnnnnnnnnnnnnnnnnnnnnnnnnnnnnnnnnnnnnnnnnnnnnnnnnnnnnnnnnnnnnnnnnnnnnnnnnnnnnnnnnnnnnnnnnnnnnnnnnnnnnnnnnnnnnnnnnnnnnnnnnnnnnnnnnnnnnnnnnnnnnnnnnnnnnnnnnnnnnnnnnnnnnnnnnnnnnnnnnnnnnnnnnnnnnnnnnnnnnnnnnnnnnnnnnnnnnnnnnnnnnnnnnnnnnnnnnnnnnnnnnnnnnnnnnnnnnnnnnnnnnnnnnnnnnnnnnnnnnnnnnnnnnnnnnnnnnnnnnnnnnnnnnnnnnnnnnnnnnnnnnnnnnnnnnnnnnnnnnnnnnnnnnnnnnnnnnnnnnnnnnnnnnnnnnnnnnnnnnnnnnnnnnnnnnnnnnnnnnnnnnnnnnnnnnnnnnnnnnnnnnnnnnnnnnnnnnnnnnnnnnnnnnnnnnnnnnnnnnnnnnnnnnnnnnnnnnnnnnnnnnnnnnnnnnnnnnnnnnnnnnnnnnnnnnnnnnnnnnnnnnnnnnnnnnnnnnnnnnnnnnnnnnnnnnnnnnnnnnnnnnnnnnnnnnnnnnnnnnnnnnnnnnnnnnnnnnnnnnnnnnnnnnnnnnnnnnnnnnnnnnnnnnnnnnnnnnnnnnnnnnnnnnnnnnnnnnnnnnnnnnnnnnnnnnnnnnnnnnnnnnnnnnnnnnnnnnnnnnnnnnnnnnnnnnnnnnnnnnnnnnnnnnnnnnnnnnnnnnnnnnnnnnnnnnnnnnnnnnnnnnnnnnnnnnnnnnnnnnnnnnnnnnnnnnnnnnnnnnnnnnnnnnnnnnnnnnnnnnnnnnnnnnnnnnnnnnnnnnnnnnnnnnnnnnnnnnnnnnnnnnnnnnnnnnnnnnnnnnnnnnnnnnnnnnnnnnnnnnnnnnnnnnnnnnnnnnnnnnnnnnnnnnnnnnnnnnnnnnnnnnnnnnnnnnnnnnnnnnnnnnnnnnnnnnnnnnnnnnnnnnnnnnnnnnnnnnnnnnnnnnnnnnnnnnnnnnnnnnnnnnnnnnnnnnnnnnnnnnnnnnnnnnnnnnnnnnnnnnnnnnnnnnnnnnnnnnnnnnnnnnnnnnnnnnnnnnnnnnnnnnnnnnnnnnnnnnnnnnnnnnnnnnnnnnnnnnnnnnnnnnnnnnnnnnnnnnnnnnnnnnnnnnnnnnnnnnnnnnnnnnnnnnnnnnnnnnnnnnnnnnnnnnnnnnnnnnnnnnnnnnnnnnnnnnnnnnnnnnnnnnnnnnnnnnnnnnnnnnnnnnnnnnnnnnnnnnnnnnnnnnnnnnnnnnnnnnnnnnnnnnnnnnnnnnnnnnnnnnnnnnnnnnnnnnnnnnnnnnnnnnnnnnnnnnnnnnnnnnnnnnnnnnnnnnnnnnnnnnnnnnnnnnnnnnnnnnnnnnnnnnnnnnnnnnnnnnnnnnnnnnnnnnnnnnnnnnnnnnnnnnnnnnnnnnnnnnnnnnnnnnnnnnnnnnnnnnnnnnnnnnnnnnnnnnnnnnnnnnnnnnnnnnnnnnnnnnnnnnnnnnnnnnnnnnnnnnnnnnnnnnnnnnnnnnnnnnnnnnnnnnnnnnnnnnnnnnnnnnnnnnnnnnnnnnnnnnnnnnnnnnnnnnnnnnnnnnnnnnnnnnnnnnnnnnnnnnnnnnnnnnnnnnnnnnnnnnnnnnnnnnnnnnnnnnnnnnnnnnnnnnnnnnnnnnnnnnnnnnnnnnnnnnnnnnnnnnnnnnnnnnnnnnnnnnnnnnnnnnnnnnnnnnnnnnnnnnnnnnnnnnnnnnnnnnnnnnnnnnnnnnnnnnnnnnnnnnnnnnnnnnnnnnnnnnnnnnnnnnnnnnnnnnnnnnnnnnnnnnnnnnnnnnnnnnnnnnnnnnnnnnnnnnnnnnnnnnnnnnnnnnnnnnnnnnnnnnnnnnnnnnnnnnnnnnnnnnnnnnnnnnnnnnnnnnnnnnnnnnnnnnnnnnnnnnnnnnnnnnnnnnnnnnnnnnnnnnnnnnnnnnnnnnnnnnnnnnnnnnnnnnnnnnnnnnnnnnnnnnnnnnnnnnnnnnnnnnnnnnnnnnnnnnnnnnnnnnnnnnnnnnnnnnnnnnnnnnnnnnnnnnnnnnnnnnnnnnnnnnnnnnnnnnnnnnnnnnnnnnnnnnnnnnnnnnnnnnnnnnnnnnnnnnnnnnnnnnnnnnnnnnnnnnnnnnnnnnnnnnnnnnnnnnnnnnnnnnnnnnnnnnnnnnnnnnnnnnnnnnnnnnnnnnnnnnnnnnnnnnnnnnnnnnnnnnnnnnnnnnnnnnnnnnnnnnnnnnnnnnnnnnnnnnnnnnnnnnnnnnnnnnnnnnnnnnnnnnnnnnnnnnnnnnnnnnnnnnnnnnnnnnnnnnnnnnnnnnnnnnnnnnnnnnnnnnnnnnnnnnnnnnnnnnnnnnnnnnnnnnnnnnnnnnnnnnnnnnnnnnnnnnnnnnnnnnnnnnnnnnnnnnnnnnnnnnnnnnnnnnnnnnnnnnnnnnnnnnnnnnnnnnnnnnnnnnnnnnnnnnnnnnnnnnnnnnnnnnnnnnnnnnnnnnnnnnnnnnnnnnnnnnnnnnnnnnnnnnnnnnnnnnnnnnnnnnnnnnnnnnnnnnnnnnnnnnnnnnnnnnnnnnnnnnnnnnnnnnnnnnnnnnnnnnnnnnnnnnnnnnnnnnnnnnnnnnnnnnnnnnnnnnnnnnnnnnnnnnnnnnnnnnnnnnnnnnnnnnnnnnnnnnnnnnnnnnnnnnnnnnnnnnnnnnnnnnnnnnnnnnnnnnnnnnnnnnnnnnnnnnnnnnnnnnnnnnnnnnnnnnnnnnnnnnnnnnnnnnnnnnnnnnnnnnnnnnnnnnnnnnnnnnnnnnnnnnnnnnnnnnnnnnnnnnnnnnnnnnnnnnnnnnnnnnnnnnnnnnnnnnnnnnnnnnnnnnnnnnnnnnnnnnnnnnnnnnnnnnnnnnnnnnnnnnnnnnnnnnnnnnnnnnnnnnnnnnnnnnnnnnnnnnnnnnnnnnnnnnnnnnnnnnnnnnnnnnnnnnnnnnnnnnnnnnnnnnnnnnnnnnnnnnnnnnnnnnnnnnnnnnnnnnnnnnnnnnnnnnnnnnnnnnnnnnnnnnnnnnnnnnnnnnnnnnnnnnnnnnnnnnnnnnnnnnnnnnnnnnnnnnnnnnnnnnnnnnnnnnnnnnnnnnnnnnnnnnnnnnnnnnnnnnnnnnnnnnnnnnnnnnnnnnnnnnnnnnnnnnnnnnnnnnnnnnnnnnnnnnnnnnnnnnnnnnnnnnnnnnnnnnnnnnnnnnnnnnnnnnnnnnnnnnnnnnnnnnnnnnnnnnnnnnnnnnnnnnnnnnnnnnnnnnnnnnnnnnnnnnnnnnnnnnnnnnnnnnnnnnnnnnnnnnnnnnnnnnnnnnnnnnnnnnnnnnnnnnnnnnnnnnnnnnnnnnnnnnnnnnnnnnnnnnnnnnnnnnnnnnnnnnnnnnnnnnnnnnnnnnnnnnnnnnnnnnnnnnnnnnnnnnnnnnnnnnnnnnnnnnnnnnnnnnnnnnnnnnnnnnnnnnnnnnnnnnnnnnnnnnnnnnnnnnnnnnnnnnnnnnnnnnnnnnnnnnnnnnnnnnnnnnnnnnnnnnnnnnnnnnnnnnnnnnnnnnnnnnnnnnnnnnnnnnnnnnnnnnnnnnnnnnnnnnnnnnnnnnnnnnnnnnnnnnnnnnnnnnnnnnnnnnnnnnnnnnnnnnnnnnnnnnnnnnnnnnnnnnnnnnnnnnnnnnnnnnnnnnnnnnnnnnnnnnnnnnnnnnnnnnnnnnnnnnnnnnnnnnnnnnnnnnnnnnnnnnnnnnnnnnnnnnnnnnnnnnnnnnnnnnnnnnnnnnnnnnnnnnnnnnnnnnnnnnnnnnnnnnnnnnnnnnnnnnnnnnnnnnnnnnnnnnnnnnnnnnnnnnnnnnnnnnnnnnnnnnnnnnnnnnnnnnnnnnnnnnnnnnnnnnnnnnnnnnnnnnnnnnnnnnnnnnnnnnnnnnnnnnnnnnnnnnnnnnnnnnnnnnnnnnnnnnnnnnnnnnnnnnnnnnnnnnnnnnnnnnnnnnnnnnnnnnnnnnnnnnnnnnnnnnnnnnnnnnnnnnnnnnnnnnnnnnnnnnnnnnnnnnnnnnnnnnnnnnnnnnnnnnnnnnnnnnnnnnnnnnnnnnnnnnnnnnnnnnnnnnnnnnnnnnnnnnnnnnnnnnnnnnnnnnnnnnnnnnnnnnnnnnnnnnnnnnnnnnnnnnnnnnnnnnnnnnnnnnnnnnnnnnnnnnnnnnnnnnnnnnnnnnnnnnnnnnnnnnnnnnnnnnnnnnnnnnnnnnnnnnnnnnnnnnnnnnnnnnnnnnnnnnnnnnnnnnnnnnnnnnnnnnnnnnnnnnnnnnnnnnnnnnnnnnnnnnnnnnnnnnnnnnnnnnnnnnnnnnnnnnnnnnnnnnnnnnnnnnnnnnnnnnnnnnnnnnnnnnnnnnnnnnnnnnnnnnnnnnnnnnnnnnnnnnnnnnnnnnnnnnnnnnnnnnnnnnnnnnnnnnnnnnnnnnnnnnnnnnnnnnnnnnnnnnnnnnnnnnnnnnnnnnnnnnnnnnnnnnnnnnnnnnnnnnnnnnnnnnnnnnnnnnnnnnnnnnnnnnnnnnnnnnnnnnnnnnnnnnnnnnnnnnnnnnnnnnnnnnnnnnnnnnnnnnnnnnnnnnnnnnnnnnnnnnnnnnnnnnnnnnnnnnnnnnnnnnnnnnnnnnnnnnnnnnnnnnnnnnnnnnnnnnnnnnnnnnnnnnnnnnnnnnnnnnnnnnnnnnnnnnnnnnnnnnnnnnnnnnnnnnnnnnnnnnnnnnnnnnnnnnnnnnnnnnnnnnnnnnnnnnnnnnnnnnnnnnnnnnnnnnnnnnnnnnnnnnnnnnnnnnnnnnnnnnnnnnnnnnnnnnnnnnnnnnnnnnnnnnnnnnnnnnnnnnnnnnnnnnnnnnnnnnnnnnnnnnnnnnnnnnnnnnnnnnnnnnnnnnnnnnnnnnnnnnnnnnnnnnnnnnnnnnnnnnnnnnnnnnnnnnnnnnnnnnnnnnnnnnnnnnnnnnnnnnnnnnnnnnnnnnnnnnnnnnnnnnnnnnnnnnnnnnnnnnnnnnnnnnnnnnnnnnnnnnnnnnnnnnnnnnnnnnnnnnnnnnnnnnnnnnnnnnnnnnnnnnnnnnnnnnnnnnnnnnnnnnnnnnnnnnnnnnnnnnnnnnnnnnnnnnnnnnnnnnnnnnnnnnnnnnnnnnnnnnnnnnnnnnnnnnnnnnnnnnnnnnnnnnnnnnnnnnnnnnnnnnnnnnnnnnnnnnnnnnnnnnnnnnnnnnnnnnnnnnnnnnnnnnnnnnnnnnnnnnnnnnnnnnnnnnnnnnnnnnnnnnnnnnnnnnnnnnnnnnnnnnnnnnnnnnnnnnnnnnnnnnnnnnnnnnnnnnnnnnnnnnnnnnnnnnnnnnnnnnnnnnnnnnnnnnnnnnnnnnnnnnnnnnnnnnnnnnnnnnnnnnnnnnnnnnnnnnnnnnnnnnnnnnnnnnnnnnnnnnnnnnnnnnnnnnnnnnnnnnnnnnnnnnnnnnnnnnnnnnnnnnnnnnnnnnnnnnnnnnnnnnnnnnnnnnnnnnnnnnnnnnnnnnnnnnnnnnnnnnnnnnnnnnnnnnnnnnnnnnnnnnnnnnnnnnnnnnnnnnnnnnnnnnnnnnnnnnnnnnnnnnnnnnnnnnnnnnnnnnnnnnnnnnnnnnnnnnnnnnnnnnnnnnnnnnnnnnnnnnnnnnnnnnnnnnnnnnnnnnnnnnnnnnnnnnnnnnnnnnnnnnnnnnnnnnnnnnnnnnnnnnnnnnnnnnnnnnnnnnnnnnnnnnnnnnnnnnnnnnnnnnnnnnnnnnnnnnnnnnnnnnnnnnnnnnnnnnnnnnnnnnnnnnnnnnnnnnnnnnnnnnnnnnnnnnnnnnnnnnnnnnnnnnnnnnnnnnnnnnnnnnnnnnnnnnnnnnnnnnnnnnnnnnnnnnnnnnnnnnnnnnnnnnnnnnnnnnnnnnnnnnnnnnnnnnnnnnnnnnnnnnnnnnnnnnnnnnnnnnnnnnnnnnnnnnnnnnnnnnnnnnnnnnnnnnnnnnnnnnnnnnnnnnnnnnnnnnnnnnnnnnnnnnnnnnnnnnnnnnnnnnnnnnnnnnnnnnnnnnnnnnnnnnnnnnnnnnnnnnnnnnnnnnnnnnnnnnnnnnnnnnnnnnnnnnnnnnnnnnnnnnnnnnnnnnnnnnnnnnnnnnnnnnnnnnnnnnnnnnnnnnnnnnnnnnnnnnnnnnnnnnnnnnnnnnnnnnnnnnnnnnnnnnnnnnnnnnnnnnnnnnnnnnnnnnnnnnnnnnnnnnnnnnnnnnnnnnnnnnnnnnnnnnnnnnnnnnnnnnnnnnnnnnnnnnnnnnnnnnnnnnnnnnnnnnnnnnnnnnnnnnnnnnnnnnnnnnnnnnnnnnnnnnnnnnnnnnnnnnnnnnnnnnnnnnnnnnnnnnnnnnnnnnnnnnnnnnnnnnnnnnnnnnnnnnnnnnnnnnnnnnnnnnnnnnnnnnnnnnnnnnnnnnnnnnnnnnnnnnnnnnnnnnnnnnnnnnnnnnnnnnnnnnnnnnnnnnnnnnnnnnnnnnnnnnnnnnnnnnnnnnnnnnnnnnnnnnnnnnnnnnnnnnnnnnnnnnnnnnnnnnnnnnnnnnnnnnnnnnnnnnnnnnnnnnnnnnnnnnnnnnnnnnnnnnnnnnnnnnnnnnnnnnnnnnnnnnnnnnnnnnnnnnnnnnnnnnnnnnnnnnnnnnnnnnnnnnnnnnnnnnnnnnnnnnnnnnnnnnnnnnnnnnnnnnnnnnnnnnnnnnnnnnnnnnnnnnnnnnnnnnnnnnnnnnnnnnnnnnnnnnnnnnnnnnnnnnnnnnnnnnnnnnnnnnnnnnnnnnnnnnnnnnnnnnnnnnnnnnnnnnnnnnnnnnnnnnnnnnnnnnnnnnnnnnnnnnnnnnnnnnnnnnnnnnnnnnnnnnnnnnnnnnnnnnnnnnnnnnnnnnnnnnnnnnnnnnnnnnnnnnnnnnnnnnnnnnnnnnnnnnnnnnnnnnnnnnnnnnnnnnnnnnnnnnnnnnnnnnnnnnnnnnnnnnnnnnnnnnnnnnnnnnnnnnnnnnnnnnnnnnnnnnnnnnnnnnnnnnnnnnnnnnnnnnnnnnnnnnnnnnnnnnnnnnnnnnnnnnnnnnnnnnnnnnnnnnnnnnnnnnnnnnnnnnnnnnnnnnnnnnnnnnnnnnnnnnnnnnnnnnnnnnnnnnnnnnnnnnnnnnnnnnnnnnnnnnnnnnnnnnnnnnnnnnnnnnnnnnnnnnnnnnnnnnnnnnnnnnnnnnnnnnnnnnnnnnnnnnnnnnnnnnnnnnnnnnnnnnnnnnnnnnnnnnnnnnnnnnnnnnnnnnnnnnnnnnnnnnnnnnnnnnnnnnnnnnnnnnnnnnnnnnnnnnnnnnnnnnnnnnnnnnnnnnnnnnnnnnnnnnnnnnnnnnnnnnnnnnnnnnnnnnnnnnnnnnnnnnnnnnnnnnnnnnnnnnnnnnnnnnnnnnnnnnnnnnnnnnnnnnnnnnnnnnnnnnnnnnnnnnnnnnnnnnnnnnnnnnnnnnnnnnnnnnnnnnnnnnnnnnnnnnnnnnnnnnnnnnnnnnnnnnnnnnnnnnnnnnnnnnnnnnnnnnnnnnnnnnnnnnnnnnnnnnnnnnnnnnnnnnnnnnnnnnnnnnnnnnnnnnnnnnnnnnnnnnnnnnnnnnnnnnnnnnnnnnnnnnnnnnnnnnnnnnnnnnnnnnnnnnnnnnnnnnnnnnnnnnnnnnnnnnnnnnnnnnnnnnnnnnnnnnnnnnnnnnnnnnnnnnnnnnnnnnnnnnnnnnnnnnnnnnnnnnnnnnnnnnnnnnnnnnnnnnnnnnnnnnnnnnnnnnnnnnnnnnnnnnnnnnnnnnnnnnnnnnnnnnnnnnnnnnnnnnnnnnnnnnnnnnnnnnnnnnnnnnnnnnnnnnnnnnnnnnnnnnnnnnnnnnnnnnnnnnnnnnnnnnnnnnnnnnnnnnnnnnnnnnnnnnnnnnnnnnnnnnnnnnnnnnnnnnnnnnnnnnnnnnnnnnnnnnnnnnnnnnnnnnnnnnnnnnnnnnnnnnnnnnnnnnnnnnnnnnnnnnnnnnnnnnnnnnnnnnnnnnnnnnnnnnnnnnnnnnnnnnnnnnnnnnnnnnnnnnnnnnnnnnnnnnnnnnnnnnnnnnnnnnnnnnnnnnnnnnnnnnnnnnnnnnnnnnnnnnnnnnnnnnnnnnnnnnnnnnnnnnnnnnnnnnnnnnnnnnnnnnnnnnnnnnnnnnnnnnnnnnnnnnnnnnnnnnnnnnnnnnnnnnnnnnnnnnnnnnnnnnnnnnnnnnnnnnnnnnnnnnnnnnnnnnnnnnnnnnnnnnnnnnnnnnnnnnnnnnnnnnnnnnnnnnnnnnnnnnnnnnnnnnnnnnnnnnnnnnnnnnnnnnnnnnnnnnnnnnnnnnnnnnnnnnnnnnnnnnnnnnnnnnnnnnnnnnnnnnnnnnnnnnnnnnnnnnnnnnnnnnnnnnnnnnnnnnnnnnnnnnnnnnnnnnnnnnnnnnnnnnnnnnnnnnnnnnnnnnnnnnnnnnnnnnnnnnnnnnnnnnnnnnnnnnnnnnnnnnnnnnnnnnnnnnnnnnnnnnnnnnnnnnnnnnnnnnnnnnnnnnnnnnnnnnnnnnnnnnnnnnnnnnnnnnnnnnnnnnnnnnnnnnnnnnnnnnnnnnnnnnnnnnnnnnnnnnnnnnnnnnnnnnnnnnnnnnnnnnnnnnnnnnnnnnnnnnnnnnnnnnnnnnnnnnnnnnnnnnnnnnnnnnnnnnnnnnnnnnnnnnnnnnnnnnnnnnnnnnnnnnnnnnnnnnnnnnnnnnnnnnnnnnnnnnnnnnnnnnnnnnnnnnnnnnnnnnnnnnnnnnnnnnnnnnnnnnnnnnnnnnnnnnnnnnnnnnnnnnnnnnnnnnnnnnnnnnnnnnnnnnnnnnnnnnnnnnnnnnnnnnnnnnnnnnnnnnnnnnnnnnnnnnnnnnnnnnnnnnnnnnnnnnnnnnnnnnnnnnnnnnnnnnnnnnnnnnnnnnnnnnnnnnnnnnnnnnnnnnnnnnnnnnnnnnnnnnnnnnnnnnnnnnnnnnnnnnnnnnnnnnnnnnnnnnnnnnnnnnnnnnnnnnnnnnnnnnnnnnnnnnnnnnnnnnnnnnnnnnnnnnnnnnnnnnnnnnnnnnnnnnnnnnnnnnnnnnnnnnnnnnnnnnnnnnnnnnnnnnnnnnnnnnnnnnnnnnnnnnnnnnnnnnnnnnnnnnnnnnnnnnnnnnnnnnnnnnnnnnnnnnnnnnnnnnnnnnnnnnnnnnnnnnnnnnnnnnnnnnnnnnnnnnnnnnnnnnnnnnnnnnnnnnnnnnnnnnnnnnnnnnnnnnnnnnnnnnnnnnnnnnnnnnnnnnnnnnnnnnnnnnnnnnnnnnnnnnnnnnnnnnnnnnnnnnnnnnnnnnnnnnnnnnnnnnnnnnnnnnnnnnnnnnnnnnnnnnnnnnnnnnnnnnnnnnnnnnnnnnnnnnnnnnnnnnnnnnnnnnnnnnnnnnnnnnnnnnnnnnnnnnnnnnnnnnnnnnnnnnnnnnnnnnnnnnnnnnnnnnnnnnnnnnnnnnnnnnnnnnnnnnnnnnnnnnnnnnnnnnnnnnnnnnnnnnnnnnnnnnnnnnnnnnnnnnnnnnnnnnnnnnnnnnnnnnnnnnnnnnnnnnnnnnnnnnnnnnnnnnnnnnnnnnnnnnnnnnnnnnnnnnnnnnnnnnnnnnnnnnnnnnnnnnnnnnnnnnnnnnnnnnnnnnnnnnnnnnnnnnnnnnnnnnnnnnnnnnnnnnnnnnnnnnnnnnnnnnnnnnnnnnnnnnnnnnnnnnnnnnnnnnnnnnnnnnnnnnnnnnnnnnnnnnnnnnnnnnnnnnnnnnnnnnnnnnnnnnnnnnnnnnnnnnnnnnnnnnnnnnnnnnnnnnnnnnnnnnnnnnnnnnnnnnnnnnnnnnnnnnnnnnnnnnnnnnnnnnnnnnnnnnnnnnnnnnnnnnnnnnnnnnnnnnnnnnnnnnnnnnnnnnnnnnnnnnnnnnnnnnnnnnnnnnnnnnnnnnnnnnnnnnnnnnnnnnnnnnnnnnnnnnnnnnnnnnnnnnnnnnnnnnnnnnnnnnnnnnnnnnnnnnnnnnnnnnnnnnnnnnnnnnnnnnnnnnnnnnnnnnnnnnnnnnnnnnnnnnnnnnnnnnnnnnnnnnnnnnnnnnnnnnnnnnnnnnnnnnnnnnnnnnnnnnnnnnnnnnnnnnnnnnnnnnnnnnnnnnnnnnnnnnnnnnnnnnnnnnnnnnnnnnnnnnnnnnnnnnnnnnnnnnnnnnnnnnnnnnnnnnnnnnnnnnnnnnnnnnnnnnnnnnnnnnnnnnnnnnnnnnnnnnnnnnnnnnnnnnnnnnnnnnnnnnnnnnnnnnnnnnnnnnnnnnnnnnnnnnnnnnnnnnnnnnnnnnnnnnnnnnnnnnnnnnnnnnnnnnnnnnnnnnnnnnnnnnnnnnnnnnnnnnnnnnnnnnnnnnnnnnnnnnnnnnnnnnnnnnnnnnnnnnnnnnnnnnnnnnnnnnnnnnnnnnnnnnnnnnnnnnnnnnnnnnnnnnnnnnnnnnnnnnnnnnnnnnnnnnnnnnnnnnnnnnnnnnnnnnnnnnnnnnnnnnnnnnnnnnnnnnnnnnnnnnnnnnnnnnnnnnnnnnnnnnnnnnnnnnnnnnnnnnnnnnnnnnnnnnnnnnnnnnnnnnnnnnnnnnnnnnnnnnnnnnnnnnnnnnnnnnnnnnnnnnnnnnnnnnnnnnnnnnnnnnnnnnnnnnnnnnnnnnnnnnnnnnnnnnnnnnnnnnnnnnnnnnnnnnnnnnnnnnnnnnnnnnnnnnnnnnnnnnnnnnnnnnnnnnnnnnnnnnnnnnnnnnnnnnnnnnnnnnnnnnnnnnnnnnnnnnnnnnnnnnnnnnnnnnnnnnnnnnnnnnnnnnnnnnnnnnnnnnnnnnnnnnnnnnnnnnnnnnnnnnnnnnnnnnnnnnnnnnnnnnnnnnnnnnnnnnnnnnnnnnnnnnnnnnnnnnnnnnnnnnnnnnnnnnnnnnnnnnnnnnnnnnnnnnnnnnnnnnnnnnnnnnnnnnnnnnnnnnnnnnnnnnnnnnnnnnnnnnnnnnnnnnnnnnnnnnnnnnnnnnnnnnnnnnnnnnnnnnnnnnnnnnnnnnnnnnnnnnnnnnnnnnnnnnnnnnnnnnnnnnnnnnnnnnnnnnnnnnnnnnnnnnnnnnnnnnnnnnnnnnnnnnnnnnnnnnnnnnnnnnnnnnnnnnnnnnnnnnnnnnnnnnnnnnnnnnnnnnnnnnnnnnnnnnnnnnnnnnnnnnnnnnnnnnnnnnnnnnnnnnnnnnnnnnnnnnnnnnnnnnnnnnnnnnnnnnnnnnnnnnnnnnnnnnnnnnnnnnnnnnnnnnnnnnnnnnnnnnnnnnnnnnnnnnnnnnnnnnnnnnnnnnnnnnnnnnnnnnnnnnnnnnnnnnnnnnnnnnnnnnnnnnnnnnnnnnnnnnnnnnnnnnnnnnnnnnnnnnnnnnnnnnnnnnnnnnnnnnnnnnnnnnnnnnnnnnnnnnnnnnnnnnnnnnnnnnnnnnnnnnnnnnnnnnnnnnnnnnnnnnnnnnnnnnnnnnnnnnnnnnnnnnnnnnnnnnnnnnnnnnnnnnnnnnnnnnnnnnnnnnnnnnnnnnnnnnnnnnnnnnnnnnnnnnnnnnnnnnnnnnnnnnnnnnnnnnnnnnnnnnnnnnnnnnnnnnnnnnnnnnnnnnnnnnnnnnnnnnnnnnnnnnnnnnnnnnnnnnnnnnnnnnnnnnnnnnnnnnnnnnnnnnnnnnnnnnnnnnnnnnnnnnnnnnnnnnnnnnnnnnnnnnnnnnnnnnnnnnnnnnnnnnnnnnnnnnnnnnnnnnnnnnnnnnnnnnnnnnnnnnnnnnnnnnnnnnnnnnnnnnnnnnnnnnnnnnnnnnnnnnnnnnnnnnnnnnnnnnnnnnnnnnnnnnnnnnnnnnnnnnnnnnnnnnnnnnnnnnnnnnnnnnnnnnnnnnnnnnnnnnnnnnnnnnnnnnnnnnnnnnnnnnnnnnnnnnnnnnnnnnnnnnnnnnnnnnnnnnnnnnnnnnnnnnnnnnnnnnnnnnnnnnnnnnnnnnnnnnnnnnnnnnnnnnnnnnnnnnnnnnnnnnnnnnnnnnnnnnnnnnnnnnnnnnnnnnnnnnnnnnnnnnnnnnnnnnnnnnnnnnnnnnnnnnnnnnnnnnnnnnnnnnnnnnnnnnnnnnnnnnnnnnnnnnnnnnnnnnnnnnnnnnnnnnnnnnnnnnnnnnnnnnnnnnnnnnnnnnnnnnnnnnnnnnnnnnnnnnnnnnnnnnnnnnnnnnnnnnnnnnnnnnnnnnnnnnnnnnnnnnnnnnnnnnnnnnnnnnnnnnnnnnnnnnnnnnnnnnnnnnnnnnnnnnnnnnnnnnnnnnnnnnnnnnnnnnnnnnnnnnnnnnnnnnnnnnnnnnnnnnnnnnnnnnnnnnnnnnnnnnnnnnnnnnnnnnnnnnnnnnnnnnnnnnnnnnnnnnnnnnnnnnnnnnnnnnnnnnnnnnnnnnnnnnnnnnnnnnnnnnnnnnnnnnnnnnnnnnnnnnnnnnnnnnnnnnnnnnnnnnnnnnnnnnnnnnnnnnnnnnnnnnnnnnnnnnnnnnnnnnnnnnnnnnnnnnnnnnnnnnnnnnnnnnnnnnnnnnnnnnnnnnnnnnnnnnnnnnnnnnnnnnnnnnnnnnnnnnnnnnnnnnnnnnnnnnnnnnnnnnnnnnnnnnnnnnnnnnnnnnnnnnnnnnnnnnnnnnnnnnnnnnnnnnnnnnnnnnnnnnnnnnnnnnnnnnnnnnnnnnnnnnnnnnnnnnnnnnnnnnnnnnnnnnnnnnnnnnnnnnnnnnnnnnnnnnnnnnnnnnnnnnnnnnnnnnnnnnnnnnnnnnnnnnnnnnnnnnnnnnnnnnnnnnnnnnnnnnnnnnnnnnnnnnnnnnnnnnnnnnnnnnnnnnnnnnnnnnnnnnnnnnnnnnnnnnnnnnnnnnnnnnnnnnnnnnnnnnnnnnnnnnnnnnnnnnnnnnnnnnnnnnnnnnnnnnnnnnnnnnnnnnnnnnnnnnnnnnnnnnnnnnnnnnnnnnnnnnnnnnnnnnnnnnnnnnnnnnnnnnnnnnnnnnnnnnnnnnnnnnnnnnnnnnnnnnnnnnnnnnnnnnnnnnnnnnnnnnnnnnnnnnnnnnnnnnnnnnnnnnnnnnnnnnnnnnnnnnnnnnnnnnnnnnnnnnnnnnnnnnnnnnnnnnnnnnnnnnnnnnnnnnnnnnnnnnnnnnnnnnnnnnnnnnnnnnnnnnnnnnnnnnnnnnnnnnnnnnnnnnnnnnnnnnnnnnnnnnnnnnnnnnnnnnnnnnnnnnnnnnnnnnnnnnnnnnnnnnnnnnnnnnnnnnnnnnnnnnnnnnnnnnnnnnnnnnnnnnnnnnnnnnnnnnnnnnnnnnnnnnnnnnnnnnnnnnnnnnnnnnnnnnnnnnnnnnnnnnnnnnnnnnnnnnnnnnnnnnnnnnnnnnnnnnnnnnnnnnnnnnnnnnnnnnnnnnnnnnnnnnnnnnnnnnnnnnnnnnnnnnnnnnnnnnnnnnnnnnnnnnnnnnnnnnnnnnnnnnnnnnnnnnnnnnnnnnnnnnnnnnnnnnnnnnnnnnnnnnnnnnnnnnnnnnnnnnnnnnnnnnnnnnnnnnnnnnnnnnnnnnnnnnnnnnnnnnnnnnnnnnnnnnnnnnnnnnnnnnnnnnnnnnnnnnnnnnnnnnnnnnnnnnnnnnnnnnnnnnnnnnnnnnnnnnnnnnnnnnnnnnnnnnnnnnnnnnnnnnnnnnnnnnnnnnnnnnnnnnnnnnnnnnnnnnnnnnnnnnnnnnnnnnnnnnnnnnnnnnnnnnnnnnnnnnnnnnnnnnnnnnnnnnnnnnnnnnnnnnnnnnnnnnnnnnnnnnnnnnnnnnnnnnnnnnnnnnnnnnnnnnnnnnnnnnnnnnnnnnnnnnnnnnnnnnnnnnnnnnnnnnnnnnnnnnnnnnnnnnnnnnnnnnnnnnnnnnnnnnnnnnnnnnnnnnnnnnnnnnnnnnnnnnnnnnnnnnnnnnnnnnnnnnnnnnnnnnnnnnnnnnnnnnnnnnnnnnnnnnnnnnnnnnnnnnnnnnnnnnnnnnnnnnnnnnnnnnnnnnnnnnnnnnnnnnnnnnnnnnnnnnnnnnnnnnnnnnnnnnnnnnnnnnnnnnnnnnnnnnnnnnnnnnnnnnnnnnnnnnnnnnnnnnnnnnnnnnnnnnnnnnnnnnnnnnnnnnnnnnnnnnnnnnnnnnnnnnnnnnnnnnnnnnnnnnnnnnnnnnnnnnnnnnnnnnnnnnnnnnnnnnnnnnnnnnnnnnnnnnnnnnnnnnnnnnnnnnnnnnnnnnnnnnnnnnnnnnnnnnnnnnnnnnnnnnnnnnnnnnnnnnnnnnnnnnnnnnnnnnnnnnnnnnnnnnnnnnnnnnnnnnnnnnnnnnnnnnnnnnnnnnnnnnnnnnnnnnnnnnnnnnnnnnnnnnnnnnnnnnnnnnnnnnnnnnnnnnnnnnnnnnnnnnnnnnnnnnnnnnnnnnnnnnnnnnnnnnnnnnnnnnnnnnnnnnnnnnnnnnnnnnnnnnnnnnnnnnnnnnnnnnnnnnnnnnnnnnnnnnnnnnnnnnnnnnnnnnnnnnnnnnnnnnnnnnnnnnnnnnnnnnnnnnnnnnnnnnnnnnnnnnnnnnnnnnnnnnnnnnnnnnnnnnnnnnnnnnnnnnnnnnnnnnnnnnnnnnnnnnnnnnnnnnnnnnnnnnnnnnnnnnnnnnnnnnnnnnnnnnnnnnnnnnnnnnnnnnnnnnnnnnnnnnnnnnnnnnnnnnnnnnnnnnnnnnnnnnnnnnnnnnnnnnnnnnnnnnnnnnnnnnnnnnnnnnnnnnnnnnnnnnnnnnnnnnnnnnnnnnnnnnnnnnnnnnnnnnnnnnnnnnnnnnnnnnnnnnnnnnnnnnnnnnnnnnnnnnnnnnnnnnnnnnnnnnnnnnnnnnnnnnnnnnnnnnnnnnnnnnnnnnnnnnnnnnnnnnnnnnnnnnnnnnnnnnnnnnnnnnnnnnnnnnnnnnnnnnnnnnnnnnnnnnnnnnnnnnnnnnnnnnnnnnnnnnnnnnnnnnnnnnnnnnnnnnnnnnnnnnnnnnnnnnnnnnnnnnnnnnnnnnnnnnnnnnnnnnnnnnnnnnnnnnnnnnnnnnnnnnnnnnnnnnnnnnnnnnnnnnnnnnnnnnnnnnnnnnnnnnnnnnnnnnnnnnnnnnnnnnnnnnnnnnnnnnnnnnnnnnnnnnnnnnnnnnnnnnnnnnnnnnnnnnnnnnnnnnnnnnnnnnnnnnnnnnnnnnnnnnnnnnnnnnnnnnnnnnnnnnnnnnnnnnnnnnnnnnnnnnnnnnnnnnnnnnnnnnnnnnnnnnnnnnnnnnnnnnnnnnnnnnnnnnnnnnnnnnnnnnnnnnnnnnnnnnnnnnnnnnnnnnnnnnnnnnnnnnnnnnnnnnnnnnnnnnnnnnnnnnnnnnnnnnnnnnnnnnnnnnnnnnnnnnnnnnnnnnnnnnnnnnnnnnnnnnnnnnnnnnnnnnnnnnnnnnnnnnnnnnnnnnnnnnnnnnnnnnnnnnnnnnnnnnnnnnnnnnnnnnnnnnnnnnnnnnnnnnnnnnnnnnnnnnnnnnnnnnnnnnnnnnnnnnnnnnnnnnnnnnnnnnnnnnnnnnnnnnnnnnnnnnnnnnnnnnnnnnnnnnnnnnnnnnnnnnnnnnnnnnnnnnnnnnnnnnnnnnnnnnnnnnnnnnnnnnnnnnnnnnnnnnnnnnnnnnnnnnnnnnnnnnnnnnnnnnnnnnnnnnnnnnnnnnnnnnnnnnnnnnnnnnnnnnnnnnnnnnnnnnnnnnnnnnnnnnnnnnnnnnnnnnnnnnnnnnnnnnnnnnnnnnnnnnnnnnnnnnnnnnnnnnnnnnnnnnnnnnnnnnnnnnnnnnnnnnnnnnnnnnnnnnnnnnnnnnnnnnnnnnnnnnnnnnnnnnnnnnnnnnnnnnnnnnnnnnnnnnnnnnnnnnnnnnnnnnnnnnnnnnnnnnnnnnnnnnnnnnnnnnnnnnnnnnnnnnnnnnnnnnnnnnnnnnnnnnnnnnnnnnnnnnnnnnnnnnnnnnnnnnnnnnnnnnnnnnnnnnnnnnnnnnnnnnnnnnnnnnnnnnnnnnnnnnnnnnnnnnnnnnnnnnnnnnnnnnnnnnnnnnnnnnnnnnnnnnnnnnnnnnnnnnnnnnnnnnnnnnnnnnnnnnnnnnnnnnnnnnnnnnnnnnnnnnnnnnnnnnnnnnnnnnnnnnnnnnnnnnnnnnnnnnnnnnnnnnnnnnnnnnnnnnnnnnnnnnnnnnnnnnnnnnnnnnnnnnnnnnnnnnnnnnnnnnnnnnnnnnnnnnnnnnnnnnnnnnnnnnnnnnnnnnnnnnnnnnnnnnnnnnnnnnnnnnnnnnnnnnnnnncccataaggaggattaccatgttgattgacattcacatgcttcagaatcacagcccggcaaacctgaacagggatgacctgggcgctcccaagacctgttattttggtggagttctgcgctcccgcatttccagccagtgcctcaagcgcagcatcagattcagtccccaattcaaatctttactgggtggcatccgcacccgcagactggcggaactgattcagcaaaaccttcaaggtaaagatgttaaacaaaaggcaaagctgattcttaaaaaatgtggcatagaaaccaaagaaggtaaagacgatactgacatgctggtctatgtggcaaagactgccatccccgaaatggcaaaatggctgcaggataatcaaatcgtcagcgatgatgaaatcgccgccgcatttggagacatcatctcaacatatgtatttgctcctgatatagctctttgcggcagaatgttggagaccggcactcttaaaaataccacggtggaggcagccttgcaagctgcgcatgccatttccacccacgctgccagaccggagattgactattatgtggcagcggatgatgtgccgggggatgatgcaggagcagcatatttggacgaatccatattttcctccgcctgtttctacaagtattattccatccactgggaacaactggtcagcaatctgaatggaaataatgaacttgccgcccatacggtgggggcgttccttcaggcagccgcttctgcaagcccttccggcaagcaaaacagctttgccgcccataatctgccggatggagttttggtggaaatcaagcaacagcctgtcagttatgccaatgcctttgtccgacctgttgagcctcagggtgatgccgatttggttgcccgcagcattgggcagtttgccaattatgtctatgatatacgcaccggctattacaatgaagaaaatgctccccggatgatttggttttcgcctaatctgcgatatcgtctgcaacctgattcaggcagcctttccctaaaggaaatcaagtccatggatgagcttgtgaaagaagtggttgagattatcggctacgattgggaaaaagtcaaacttgtaaaggcagagggggcggaatgatatggataccaaacccaatacgctcttcctgagactggaaggtcctttgcaagcctgggggacgcatgaagcccggtttgccctgcgccgcattgccggatatcccaccaaatccggtgtaatgggtatgctctgcgctgccctgggcatctccagaccagaagctccagccagacttccggaactgaatgctctcagcctgggtgtccgggtggataatcccggtatccgctggtgggattttcacacggttggcgccaaacaggagatggtgatagctgaaccgcgccagaaaccagccagccctgctcaagtcggaccggaatttgataaaatcctgtcatccctgaaacctaaaaccaagcccggcgcattgctctcaaggcgtgagtatttggctgatgccagctttctggttgtcttgcagggagatgaaaagctgattgacacgctctggcaagccatctgccatcctgtctggcagatgtatctgggcagaaagtcctgtccaccctccagacccatcaatgagcacgctccggcatatcatccggatttggttgctgccctcatgtccatctctatcagaaaaagaattacggattattcattatcagatcctgtgtcctgctatcttgactggagaccgggcgaacatgagcctgaagctcctgagaacgctttaattcgttatgatgttcccatcagctttgacccgccccgtcagcaggcacgctatgttataccggttgaaatccccgtagcagaccttgatgtgattgaggaaacctctcccaaaccgtggcatcctaaacgtccaagagcggattatacaaataccgagtataaaaaaaagcgcctggagcgtctggctcttgacaagggattgtgcgtcttctgcaaatcccccgccaccaccgttcagcatgtcaattaccgcagggcgggtggaaatgagcaaattgaagatttaagagcactctgccgcatctgccatgatgccgtaaccatgctggaatatggcgagggcatgactacggacaggattgacccctctgaccctgcctggcgggatagaatacttgccaaaagactggaaattataaagttccgttctctggaaacccgccgccgtcatctatccgaagaggaggtgtgatgtatctctcccagttgctgatagacacaggtggcaatccggaccgcttgcgcaccggcaaaaagtggattggcaatatctacaatgtccaccgcaggctatccatggcttttcccacctatgaaaaaagacggcgagacccggatttcctcgaaccatataaaccagaggattttgaccagagggcgtttttataccggttggataacaatgtggacggtcaatcacgcagagcggtcatcattgttcagtcccacacattaccagattggcaatggtgttttcataacgccaccgattttttagccgctcaccctcaggtcaggatatacgaaccagcttatgtttctggtcaggaactccggttccgtatctgcttgaatgccagtataaaaagcaccaaatatcggaatcccgttcagccaagtgaatccgaccctttatctcagaaaactcagggtaaacggatagccctgatgtgggacaaggacaaatctccggatgaagctgcccttgagtggtttcaaaccaagattgccggaaagggttttgatctgcacagggttgaattgattaaactgggctgggtctatggctttaagccggtgcatggcagtgaagagagcttgagtcatacaatgcgcttccggtctgccttgctggaaggcatcctgaaagtggaagaccccatattatttgctacagtcatctccaatggcatcggcagcgccaaagcctttggatttgggctgctgtcagtctcaggtaattgagtgactgtcaaagacctgcatatcattcccaaagtgagggacaaacattcctttctctatgtggaacatgccagcatagataaggaagatatggctatcgccattcataatcaaatgggaatgactcccgttccatgtgccaatctcgctctgctgatgttaggacctggagtttccataacgcatgcggctatattgaccttggctgactgtggttgtctggtggcttgggtgggagaaaatgccgtccgtttttacgcttccggggttggcactgccagaagttctattgacctgatgaaacaggctgccgcctggtctgatctcacagaaaggatgaggatagtccggcagctgtatcaaatgagatttcaggaatcctttggtccggatctgaccattgagcaattgcgcggaaaggaaggggctcgcgtcagggatgcatactttaatctatcccgtcaatatggtgtccccatgcagggcagaaactatgacagaaatagctggaagaccgcagaccctataaaccgcgctttatctgtggcaaattcctgtctttatggtgtctgccatgccgccatcgtatcagcaggttactctccgggacttggcttcatccataccggaaaaaacctctctttcgtttacgatgtggctgacctgtataaaatggaaaccgctgcaccggctgcatttaaagcggtatctcagaatgttcagcctttggaaaaaggtgtccgaattgcctgccgtgatatgttccatgaaacaaatctgctgaaaaggatagttgaagatattcatactttgtttggaaaggaagagccatttgactctgatgccagcagtgaagatgaggaggcttcattgtcattgtgggaccctgtcaccggaatctgtcaggctggtgtttcctacggtctggataaaggaaattctaatgattgtcctgatggttgaaaatatgcctgcttctgtcaaaggtgaaatcacccgttggctgcaggaaatcagacctggcgtctttctcggaaatctgtcgtcacgcgtaagagaaaaactctgggacagaatatgccaaaattgccggggtggaactgccatgattatctggtcaagtaacaatgaacaaggttttttggttgacttctggggtatcactgccaggtttgttacagaatgggaaggacttcagctctttacaaagcacccaaagccttgattttactaagtgtcttccccacgcccgtgggggttaaccggcagcgggtgggctctccaatgcgcttttcaagtcttccccacgcccgtgggggttaaccgctataagagcataacaatttccgcagaagatagtcttccccacgcccgtgggggttaacctgtagaaataggtaatggcggtgtaatccaacggtcttccccacgcccgtgggggttaaccgccacctttggcactctataagctcaaaaagcagtcttccccacgcccgtgggggttaaccgtggtgctacggcaagaagctgaccaaagcaaagtcttccccacgcccgtgggggttaaccgcgaagtggcagcaggctggcggcattggagcggtcttccccacgcccgtgggggttaaccggatgccattgtcaatggcgggcagaatattttgtcttccccacgcccgtgggggttaaccgtgggagatgtgctggtaagcgacgggcatgatgtcttccccacgcccgtgggggttaacctatgacagcctggggattcggagacagcatgcggtcttccccacgcccgtgggggttaaccgccgaattatccaaaattaacgaaatcgccaaagtcttccccacgcccgtgggggttaaccgcgctcttggcaatctggctgagctgctcaatcgtcttccccacgcccgtgggggttaaccgatggaaatggcaacgttttgcccattctgaccgtcttccccacgcccgtgggggttaaccgatgccatgactgttatattctatttaagggacgtcttccccacgcccgtgggggttaaccgtaaaaatattgtttgacgatatttatgctaatgtcttccccacgcccgtgggggttaacctcaggtatccgatatgaaatgcgcacagatagagtcttccccacgcccgtgggggttaacctaaatgccacgatgtcaactgcatcatcctcttgtcttccccacgcccgtgggggttaaccggtgtgcgctgtggcaaatacatccccgtcaatgtcttccccacgcccgtgggggttaaccgtcaataagcttattccgacaatacacacgctagtcttccccacgcccgtgggggttaaccgcacaccgtctggctgtctgagtttggcactgagtcttccccacgcccgtgggggttaaccgcatggataatgaattgctgacagtatcagatggtcttccccacgcccgtgggggttaacctacagtaaccaggacagactgtcctgtctggctgtcttccccacgcccgtgggggttaaccggcagcactaaagggcaatgtgtcaatgcttatgtcttccccacgcccgtgggggttaaccggatgttgtggttgggactacagggaaagacgagtcttccccacgcccgtgggggttaaccgcggaacgttaaactttgtcgggaagcccgggagtcttccccacgcccgtggggattaaccgcgaagtggctaccggctgccagcattggagaggtcttccccacgcccgtgggggttaaccatttactctcgcctgaacagatgtccccacaatcagggcaccttgccgaacaaaaagtggcgcaaggtgtcctgatcctcgtgatatgtgagcaaggaggaggtgggtcatggcataaagaagacgtcatacttaggctgggtctgttcccgacctggtcgtggaaatcgtgacacagaggcgttccatccttcgacaggctcaggatgacggtgaaagggtagaggatgatgtaaaagcttaggataacgacaagctcaggaagaagtataagaatagatgatgataatactaccacgggcgtcacgctgagcctgtcgaagcgcgacttagtgaggcgttccatccttcgacaggctcaggatgacgatacccggtataatgacatctgccattgtttgctgtgtttatctgtgatttctgaggttaatcatccttcccctgaacagcttgcaacgagggtcagccggttttcttacccagggctgcggcgtagatgacgaaggcgtcggtgccgtttgcctgcaggagggcgttcatggcagcatcgttgtaggctccgatcatacaggctccggcgccgatggcttccgctgccagatggaggttttgaccggcgtgtccggcatccagatagagatagcggtaacttctctggctgtagcgccagcttgcccggtaggggattgccagccagatgaaggtgacggcgctgtgcaggaccatttcctgtccgaggcaggcttcacagacagcctgagcctgttctgctccgcttttgtaaagcaccagtccgtgttgcagcggatggtaataatacaatccgggtgcgatgcctttcaccctgttcagcagcagataggtttccaggggatggcggcaaccggcggagggcacctggcggaagccgagttccatctttggggtgacgcggtgctccctgatccattgggttgaccaaagcagccaggatagttcggcttggctaagaggcttatcagtataattgcgcaggctgcgtctttgggcaattgcctgagccaaagtgatatccggctttgtgagggtatccggcgcgggcaggggtatgatttcgccctccagaggctgaaaggcggggggacaaggctcgcctttggattgggcggactcatggtcgtagatgtagtgggtgagacgcacgaagtcctgtccgatgtgcggatgggcggtccgctctgcctgtatggcggtcacctcgtcccgcaggctttgttccagttcggcatattccgtttcggtgagttcggcttccttcaggatggtctcccggtcagcgcctctgactttgtaaaaaaggtagttcatggtcttattgtccatgggtggtgctcctctataaatatgcttatggagggcagtcttaccgagcgggagaaagtgtcaatcccaaagggaaacgaaaaaacacttgtcaaaaagacctgtccggctgataagcaattccggagcggaacctcagactttggacgaggatgcttccggctccgggtgataataaaggattgaggtgaactatgacgatagctgacatgctgatatttctggagcagcttgcccccaaagggcttgcctgcagttgggacaatgtgggtttgcaggtgggcagtcctgattgggcggcagaccgggtgctgctcacgctggatgtgactgccgcagtgatagattatgcgaggaacaaggggtttgacctcatcctgagccaccatccgctgattttcaagccggtgcacagcgtcagcagaccggatatcctgcggctggtggaatatcgcatcggggtgatagccctgcatacgaatctggatgtggtgccggatggagtaaactatgccttggcagaggttttgggtctgacgaagctgcgtgttctcagtccggagaccggcagcgtgtggtatcatggctcggtgacggtgccgcctgattatgtggacagggtcagaatcgccctgcacaatgccggcgccggcagaatcggggcttatgaccgctgcagcactgctcatccggtatccggcaccttccgggctttgccggaaagccagcccttccttggcaacaaaggcagcctggaacaggtggaggaagtggaactggaatttatggtggatggcttccacctggccgccgtgaaacaggcgcttgccgcagttcatccctacgagacgccggcagcctattttgttgccgtggaaactgccaatccggcttatgggctgggattgattggcgaattggcggcggagaccacgctggaggattttgcccggcaggtgaaacagcgtttgcaggcacctggcgtgcaactgtggacggcgggcaaacccaggaaacaattggtcagacagatagccatctgtggcggagccggagggtcgctcatcgggcaagccaccggcagggcggatgtctttgtcaccggcgatctcaattatcatgccatgctggacagccgtatcccgctcatcaatgccggacacttctggacggagtatccggtattgcccgccctgaagcggattctggctgcctcagaagcaaaggtggcagtctttcccctcagcctggcggcagtcaatcaaatccactattattagcagtagatagattgaaa

SEQ ID NO: 1085 - DNA, 104390 bp, Artificial Sequence
  Synthetic Oligonucleotide
  misc_feature (1)..(95976): n is a, c, g, or t
nnnnnnnnnnnnnnnnnnnnnnnnnnnnnnnnnnnnnnnnnnnnnnnnnnnnnnnnnnnnnnnnnnnnnnnnnnnnnnnnnnnnnnnnnnnnnnnnnnnnnnnnnnnnnnnnnnnnnnnnnnnnnnnnnnnnnnnnnnnnnnnnnnnnnnnnnnnnnnnnnnnnnnnnnnnnnnnnnnnnnnnnnnnnnnnnnnnnnnnnnnnnnnnnnnnnnnnnnnnnnnnnnnnnnnnnnnnnnnnnnnnnnnnnnnnnnnnnnnnnnnnnnnnnnnnnnnnnnnnnnnnnnnnnnnnnnnnnnnnnnnnnnnnnnnnnnnnnnnnnnnnnnnnnnnnnnnnnnnnnnnnnnnnnnnnnnnnnnnnnnnnnnnnnnnnnnnnnnnnnnnnnnnnnnnnnnnnnnnnnnnnnnnnnnnnnnnnnnnnnnnnnnnnnnnnnnnnnnnnnnnnnnnnnnnnnnnnnnnnnnnnnnnnnnnnnnnnnnnnnnnnnnnnnnnnnnnnnnnnnnnnnnnnnnnnnnnnnnnnnnnnnnnnnnnnnnnnnnnnnnnnnnnnnnnnnnnnnnnnnnnnnnnnnnnnnnnnnnnnnnnnnnnnnnnnnnnnnnnnnnnnnnnnnnnnnnnnnnnnnnnnnnnnnnnnnnnnnnnnnnnnnnnnnnnnnnnnnnnnnnnnnnnnnnnnnnnnnnnnnnnnnnnnnnnnnnnnnnnnnnnnnnnnnnnnnnnnnnnnnnnnnnnnnnnnnnnnnnnnnnnnnnnnnnnnnnnnnnnnnnnnnnnnnnnnnnnnnnnnnnnnnnnnnnnnnnnnnnnnnnnnnnnnnnnnnnnnnnnnnnnnnnnnnnnnnnnnnnnnnnnnnnnnnnnnnnnnnnnnnnnnnnnnnnnnnnnnnnnnnnnnnnnnnnnnnnnnnnnnnnnnnnnnnnnnnnnnnnnnnnnnnnnnnnnnnnnnnnnnnnnnnnnnnnnnnnnnnnnnnnnnnnnnnnnnnnnnnnnnnnnnnnnnnnnnnnnnnnnnnnnnnnnnnnnnnnnnnnnnnnnnnnnnnnnnnnnnnnnnnnnnnnnnnnnnnnnnnnnnnnnnnnnnnnnnnnnnnnnnnnnnnnnnnnnnnnnnnnnnnnnnnnnnnnnnnnnnnnnnnnnnnnnnnnnnnnnnnnnnnnnnnnnnnnnnnnnnnnnnnnnnnnnnnnnnnnnnnnnnnnnnnnnnnnnnnnnnnnnnnnnnnnnnnnnnnnnnnnnnnnnnnnnnnnnnnnnnnnnnnnnnnnnnnnnnnnnnnnnnnnnnnnnnnnnnnnnnnnnnnnnnnnnnnnnnnnnnnnnnnnnnnnnnnnnnnnnnnnnnnnnnnnnnnnnnnnnnnnnnnnnnnnnnnnnnnnnnnnnnnnnnnnnnnnnnnnnnnnnnnnnnnnnnnnnnnnnnnnnnnnnnnnnnnnnnnnnnnnnnnnnnnnnnnnnnnnnnnnnnnnnnnnnnnnnnnnnnnnnnnnnnnnnnnnnnnnnnnnnnnnnnnnnnnnnnnnnnnnnnnnnnnnnnnnnnnnnnnnnnnnnnnnnnnnnnnnnnnnnnnnnnnnnnnnnnnnnnnnnnnnnnnnnnnnnnnnnnnnnnnnnnnnnnnnnnnnnnnnnnnnnnnnnnnnnnnnnnnnnnnnnnnnnnnnnnnnnnnnnnnnnnnnnnnnnnnnnnnnnnnnnnnnnnnnnnnnnnnnnnnnnnnnnnnnnnnnnnnnnnnnnnnnnnnnnnnnnnnnnnnnnnnnnnnnnnnnnnnnnnnnnnnnnnnnnnnnnnnnnnnnnnnnnnnnnnnnnnnnnnnnnnnnnnnnnnnnnnnnnnnnnnnnnnnnnnnnnnnnnnnnnnnnnnnnnnnnnnnnnnnnnnnnnnnnnnnnnnnnnnnnnnnnnnnnnnnnnnnnnnnnnnnnnnnnnnnnnnnnnnnnnnnnnnnnnnnnnnnnnnnnnnnnnnnnnnnnnnnnnnnnnnnnnnnnnnnnnnnnnnnnnnnnnnnnnnnnnnnnnnnnnnnnnnnnnnnnnnnnnnnnnnnnnnnnnnnnnnnnnnnnnnnnnnnnnnnnnnnnnnnnnnnnnnnnnnnnnnnnnnnnnnnnnnnnnnnnnnnnnnnnnnnnnnnnnnnnnnnnnnnnnnnnnnnnnnnnnnnnnnnnnnnnnnnnnnnnnnnnnnnnnnnnnnnnnnnnnnnnnnnnnnnnnnnnnnnnnnnnnnnnnnnnnnnnnnnnnnnnnnnnnnnnnnnnnnnnnnnnnnnnnnnnnnnnnnnnnnnnnnnnnnnnnnnnnnnnnnnnnnnnnnnnnnnnnnnnnnnnnnnnnnnnnnnnnnnnnnnnnnnnnnnnnnnnnnnnnnnnnnnnnnnnnnnnnnnnnnnnnnnnnnnnnnnnnnnnnnnnnnnnnnnnnnnnnnnnnnnnnnnnnnnnnnnnnnnnnnnnnnnnnnnnnnnnnnnnnnnnnnnnnnnnnnnnnnnnnnnnnnnnnnnnnnnnnnnnnnnnnnnnnnnnnnnnnnnnnnnnnnnnnnnnnnnnnnnnnnnnnnnnnnnnnnnnnnnnnnnnnnnnnnnnnnnnnnnnnnnnnnnnnnnnnnnnnnnnnnnnnnnnnnnnnnnnnnnnnnnnnnnnnnnnnnnnnnnnnnnnnnnnnnnnnnnnnnnnnnnnnnnnnnnnnnnnnnnnnnnnnnnnnnnnnnnnnnnnnnnnnnnnnnnnnnnnnnnnnnnnnnnnnnnnnnnnnnnnnnnnnnnnnnnnnnnnnnnnnnnnnnnnnnnnnnnnnnnnnnnnnnnnnnnnnnnnnnnnnnnnnnnnnnnnnnnnnnnnnnnnnnnnnnnnnnnnnnnnnnnnnnnnnnnnnnnnnnnnnnnnnnnnnnnnnnnnnnnnnnnnnnnnnnnnnnnnnnnnnnnnnnnnnnnnnnnnnnnnnnnnnnnnnnnnnnnnnnnnnnnnnnnnnnnnnnnnnnnnnnnnnnnnnnnnnnnnnnnnnnnnnnnnnnnnnnnnnnnnnnnnnnnnnnnnnnnnnnnnnnnnnnnnnnnnnnnnnnnnnnnnnnnnnnnnnnnnnnnnnnnnnnnnnnnnnnnnnnnnnnnnnnnnnnnnnnnnnnnnnnnnnnnnnnnnnnnnnnnnnnnnnnnnnnnnnnnnnnnnnnnnnnnnnnnnnnnnnnnnnnnnnnnnnnnnnnnnnnnnnnnnnnnnnnnnnnnnnnnnnnnnnnnnnnnnnnnnnnnnnnnnnnnnnnnnnnnnnnnnnnnnnnnnnnnnnnnnnnnnnnnnnnnnnnnnnnnnnnnnnnnnnnnnnnnnnnnnnnnnnnnnnnnnnnnnnnnnnnnnnnnnnnnnnnnnnnnnnnnnnnnnnnnnnnnnnnnnnnnnnnnnnnnnnnnnnnnnnnnnnnnnnnnnnnnnnnnnnnnnnnnnnnnnnnnnnnnnnnnnnnnnnnnnnnnnnnnnnnnnnnnnnnnnnnnnnnnnnnnnnnnnnnnnnnnnnnnnnnnnnnnnnnnnnnnnnnnnnnnnnnnnnnnnnnnnnnnnnnnnnnnnnnnnnnnnnnnnnnnnnnnnnnnnnnnnnnnnnnnnnnnnnnnnnnnnnnnnnnnnnnnnnnnnnnnnnnnnnnnnnnnnnnnnnnnnnnnnnnnnnnnnnnnnnnnnnnnnnnnnnnnnnnnnnnnnnnnnnnnnnnnnnnnnnnnnnnnnnnnnnnnnnnnnnnnnnnnnnnnnnnnnnnnnnnnnnnnnnnnnnnnnnnnnnnnnnnnnnnnnnnnnnnnnnnnnnnnnnnnnnnnnnnnnnnnnnnnnnnnnnnnnnnnnnnnnnnnnnnnnnnnnnnnnnnnnnnnnnnnnnnnnnnnnnnnnnnnnnnnnnnnnnnnnnnnnnnnnnnnnnnnnnnnnnnnnnnnnnnnnnnnnnnnnnnnnnnnnnnnnnnnnnnnnnnnnnnnnnnnnnnnnnnnnnnnnnnnnnnnnnnnnnnnnnnnnnnnnnnnnnnnnnnnnnnnnnnnnnnnnnnnnnnnnnnnnnnnnnnnnnnnnnnnnnnnnnnnnnnnnnnnnnnnnnnnnnnnnnnnnnnnnnnnnnnnnnnnnnnnnnnnnnnnnnnnnnnnnnnnnnnnnnnnnnnnnnnnnnnnnnnnnnnnnnnnnnnnnnnnnnnnnnnnnnnnnnnnnnnnnnnnnnnnnnnnnnnnnnnnnnnnnnnnnnnnnnnnnnnnnnnnnnnnnnnnnnnnnnnnnnnnnnnnnnnnnnnnnnnnnnnnnnnnnnnnnnnnnnnnnnnnnnnnnnnnnnnnnnnnnnnnnnnnnnnnnnnnnnnnnnnnnnnnnnnnnnnnnnnnnnnnnnnnnnnnnnnnnnnnnnnnnnnnnnnnnnnnnnnnnnnnnnnnnnnnnnnnnnnnnnnnnnnnnnnnnnnnnnnnnnnnnnnnnnnnnnnnnnnnnnnnnnnnnnnnnnnnnnnnnnnnnnnnnnnnnnnnnnnnnnnnnnnnnnnnnnnnnnnnnnnnnnnnnnnnnnnnnnnnnnnnnnnnnnnnnnnnnnnnnnnnnnnnnnnnnnnnnnnnnnnnnnnnnnnnnnnnnnnnnnnnnnnnnnnnnnnnnnnnnnnnnnnnnnnnnnnnnnnnnnnnnnnnnnnnnnnnnnnnnnnnnnnnnnnnnnnnnnnnnnnnnnnnnnnnnnnnnnnnnnnnnnnnnnnnnnnnnnnnnnnnnnnnnnnnnnnnnnnnnnnnnnnnnnnnnnnnnnnnnnnnnnnnnnnnnnnnnnnnnnnnnnnnnnnnnnnnnnnnnnnnnnnnnnnnnnnnnnnnnnnnnnnnnnnnnnnnnnnnnnnnnnnnnnnnnnnnnnnnnnnnnnnnnnnnnnnnnnnnnnnnnnnnnnnnnnnnnnnnnnnnnnnnnnnnnnnnnnnnnnnnnnnnnnnnnnnnnnnnnnnnnnnnnnnnnnnnnnnnnnnnnnnnnnnnnnnnnnnnnnnnnnnnnnnnnnnnnnnnnnnnnnnnnnnnnnnnnnnnnnnnnnnnnnnnnnnnnnnnnnnnnnnnnnnnnnnnnnnnnnnnnnnnnnnnnnnnnnnnnnnnnnnnnnnnnnnnnnnnnnnnnnnnnnnnnnnnnnnnnnnnnnnnnnnnnnnnnnnnnnnnnnnnnnnnnnnnnnnnnnnnnnnnnnnnnnnnnnnnnnnnnnnnnnnnnnnnnnnnnnnnnnnnnnnnnnnnnnnnnnnnnnnnnnnnnnnnnnnnnnnnnnnnnnnnnnnnnnnnnnnnnnnnnnnnnnnnnnnnnnnnnnnnnnnnnnnnnnnnnnnnnnnnnnnnnnnnnnnnnnnnnnnnnnnnnnnnnnnnnnnnnnnnnnnnnnnnnnnnnnnnnnnnnnnnnnnnnnnnnnnnnnnnnnnnnnnnnnnnnnnnnnnnnnnnnnnnnnnnnnnnnnnnnnnnnnnnnnnnnnnnnnnnnnnnnnnnnnnnnnnnnnnnnnnnnnnnnnnnnnnnnnnnnnnnnnnnnnnnnnnnnnnnnnnnnnnnnnnnnnnnnnnnnnnnnnnnnnnnnnnnnnnnnnnnnnnnnnnnnnnnnnnnnnnnnnnnnnnnnnnnnnnnnnnnnnnnnnnnnnnnnnnnnnnnnnnnnnnnnnnnnnnnnnnnnnnnnnnnnnnnnnnnnnnnnnnnnnnnnnnnnnnnnnnnnnnnnnnnnnnnnnnnnnnnnnnnnnnnnnnnnnnnnnnnnnnnnnnnnnnnnnnnnnnnnnnnnnnnnnnnnnnnnnnnnnnnnnnnnnnnnnnnnnnnnnnnnnnnnnnnnnnnnnnnnnnnnnnnnnnnnnnnnnnnnnnnnnnnnnnnnnnnnnnnnnnnnnnnnnnnnnnnnnnnnnnnnnnnnnnnnnnnnnnnnnnnnnnnnnnnnnnnnnnnnnnnnnnnnnnnnnnnnnnnnnnnnnnnnnnnnnnnnnnnnnnnnnnnnnnnnnnnnnnnnnnnnnnnnnnnnnnnnnnnnnnnnnnnnnnnnnnnnnnnnnnnnnnnnnnnnnnnnnnnnnnnnnnnnnnnnnnnnnnnnnnnnnnnnnnnnnnnnnnnnnnnnnnnnnnnnnnnnnnnnnnnnnnnnnnnnnnnnnnnnnnnnnnnnnnnnnnnnnnnnnnnnnnnnnnnnnnnnnnnnnnnnnnnnnnnnnnnnnnnnnnnnnnnnnnnnnnnnnnnnnnnnnnnnnnnnnnnnnnnnnnnnnnnnnnnnnnnnnnnnnnnnnnnnnnnnnnnnnnnnnnnnnnnnnnnnnnnnnnnnnnnnnnnnnnnnnnnnnnnnnnnnnnnnnnnnnnnnnnnnnnnnnnnnnnnnnnnnnnnnnnnnnnnnnnnnnnnnnnnnnnnnnnnnnnnnnnnnnnnnnnnnnnnnnnnnnnnnnnnnnnnnnnnnnnnnnnnnnnnnnnnnnnnnnnnnnnnnnnnnnnnnnnnnnnnnnnnnnnnnnnnnnnnnnnnnnnnnnnnnnnnnnnnnnnnnnnnnnnnnnnnnnnnnnnnnnnnnnnnnnnnnnnnnnnnnnnnnnnnnnnnnnnnnnnnnnnnnnnnnnnnnnnnnnnnnnnnnnnnnnnnnnnnnnnnnnnnnnnnnnnnnnnnnnnnnnnnnnnnnnnnnnnnnnnnnnnnnnnnnnnnnnnnnnnnnnnnnnnnnnnnnnnnnnnnnnnnnnnnnnnnnnnnnnnnnnnnnnnnnnnnnnnnnnnnnnnnnnnnnnnnnnnnnnnnnnnnnnnnnnnnnnnnnnnnnnnnnnnnnnnnnnnnnnnnnnnnnnnnnnnnnnnnnnnnnnnnnnnnnnnnnnnnnnnnnnnnnnnnnnnnnnnnnnnnnnnnnnnnnnnnnnnnnnnnnnnnnnnnnnnnnnnnnnnnnnnnnnnnnnnnnnnnnnnnnnnnnnnnnnnnnnnnnnnnnnnnnnnnnnnnnnnnnnnnnnnnnnnnnnnnnnnnnnnnnnnnnnnnnnnnnnnnnnnnnnnnnnnnnnnnnnnnnnnnnnnnnnnnnnnnnnnnnnnnnnnnnnnnnnnnnnnnnnnnnnnnnnnnnnnnnnnnnnnnnnnnnnnnnnnnnnnnnnnnnnnnnnnnnnnnnnnnnnnnnnnnnnnnnnnnnnnnnnnnnnnnnnnnnnnnnnnnnnnnnnnnnnnnnnnnnnnnnnnnnnnnnnnnnnnnnnnnnnnnnnnnnnnnnnnnnnnnnnnnnnnnnnnnnnnnnnnnnnnnnnnnnnnnnnnnnnnnnnnnnnnnnnnnnnnnnnnnnnnnnnnnnnnnnnnnnnnnnnnnnnnnnnnnnnnnnnnnnnnnnnnnnnnnnnnnnnnnnnnnnnnnnnnnnnnnnnnnnnnnnnnnnnnnnnnnnnnnnnnnnnnnnnnnnnnnnnnnnnnnnnnnnnnnnnnnnnnnnnnnnnnnnnnnnnnnnnnnnnnnnnnnnnnnnnnnnnnnnnnnnnnnnnnnnnnnnnnnnnnnnnnnnnnnnnnnnnnnnnnnnnnnnnnnnnnnnnnnnnnnnnnnnnnnnnnnnnnnnnnnnnnnnnnnnnnnnnnnnnnnnnnnnnnnnnnnnnnnnnnnnnnnnnnnnnnnnnnnnnnnnnnnnnnnnnnnnnnnnnnnnnnnnnnnnnnnnnnnnnnnnnnnnnnnnnnnnnnnnnnnnnnnnnnnnnnnnnnnnnnnnnnnnnnnnnnnnnnnnnnnnnnnnnnnnnnnnnnnnnnnnnnnnnnnnnnnnnnnnnnnnnnnnnnnnnnnnnnnnnnnnnnnnnnnnnnnnnnnnnnnnnnnnnnnnnnnnnnnnnnnnnnnnnnnnnnnnnnnnnnnnnnnnnnnnnnnnnnnnnnnnnnnnnnnnnnnnnnnnnnnnnnnnnnnnnnnnnnnnnnnnnnnnnnnnnnnnnnnnnnnnnnnnnnnnnnnnnnnnnnnnnnnnnnnnnnnnnnnnnnnnnnnnnnnnnnnnnnnnnnnnnnnnnnnnnnnnnnnnnnnnnnnnnnnnnnnnnnnnnnnnnnnnnnnnnnnnnnnnnnnnnnnnnnnnnnnnnnnnnnnnnnnnnnnnnnnnnnnnnnnnnnnnnnnnnnnnnnnnnnnnnnnnnnnnnnnnnnnnnnnnnnnnnnnnnnnnnnnnnnnnnnnnnnnnnnnnnnnnnnnnnnnnnnnnnnnnnnnnnnnnnnnnnnnnnnnnnnnnnnnnnnnnnnnnnnnnnnnnnnnnnnnnnnnnnnnnnnnnnnnnnnnnnnnnnnnnnnnnnnnnnnnnnnnnnnnnnnnnnnnnnnnnnnnnnnnnnnnnnnnnnnnnnnnnnnnnnnnnnnnnnnnnnnnnnnnnnnnnnnnnnnnnnnnnnnnnnnnnnnnnnnnnnnnnnnnnnnnnnnnnnnnnnnnnnnnnnnnnnnnnnnnnnnnnnnnnnnnnnnnnnnnnnnnnnnnnnnnnnnnnnnnnnnnnnnnnnnnnnnnnnnnnnnnnnnnnnnnnnnnnnnnnnnnnnnnnnnnnnnnnnnnnnnnnnnnnnnnnnnnnnnnnnnnnnnnnnnnnnnnnnnnnnnnnnnnnnnnnnnnnnnnnnnnnnnnnnnnnnnnnnnnnnnnnnnnnnnnnnnnnnnnnnnnnnnnnnnnnnnnnnnnnnnnnnnnnnnnnnnnnnnnnnnnnnnnnnnnnnnnnnnnnnnnnnnnnnnnnnnnnnnnnnnnnnnnnnnnnnnnnnnnnnnnnnnnnnnnnnnnnnnnnnnnnnnnnnnnnnnnnnnnnnnnnnnnnnnnnnnnnnnnnnnnnnnnnnnnnnnnnnnnnnnnnnnnnnnnnnnnnnnnnnnnnnnnnnnnnnnnnnnnnnnnnnnnnnnnnnnnnnnnnnnnnnnnnnnnnnnnnnnnnnnnnnnnnnnnnnnnnnnnnnnnnnnnnnnnnnnnnnnnnnnnnnnnnnnnnnnnnnnnnnnnnnnnnnnnnnnnnnnnnnnnnnnnnnnnnnnnnnnnnnnnnnnnnnnnnnnnnnnnnnnnnnnnnnnnnnnnnnnnnnnnnnnnnnnnnnnnnnnnnnnnnnnnnnnnnnnnnnnnnnnnnnnnnnnnnnnnnnnnnnnnnnnnnnnnnnnnnnnnnnnnnnnnnnnnnnnnnnnnnnnnnnnnnnnnnnnnnnnnnnnnnnnnnnnnnnnnnnnnnnnnnnnnnnnnnnnnnnnnnnnnnnnnnnnnnnnnnnnnnnnnnnnnnnnnnnnnnnnnnnnnnnnnnnnnnnnnnnnnnnnnnnnnnnnnnnnnnnnnnnnnnnnnnnnnnnnnnnnnnnnnnnnnnnnnnnnnnnnnnnnnnnnnnnnnnnnnnnnnnnnnnnnnnnnnnnnnnnnnnnnnnnnnnnnnnnnnnnnnnnnnnnnnnnnnnnnnnnnnnnnnnnnnnnnnnnnnnnnnnnnnnnnnnnnnnnnnnnnnnnnnnnnnnnnnnnnnnnnnnnnnnnnnnnnnnnnnnnnnnnnnnnnnnnnnnnnnnnnnnnnnnnnnnnnnnnnnnnnnnnnnnnnnnnnnnnnnnnnnnnnnnnnnnnnnnnnnnnnnnnnnnnnnnnnnnnnnnnnnnnnnnnnnnnnnnnnnnnnnnnnnnnnnnnnnnnnnnnnnnnnnnnnnnnnnnnnnnnnnnnnnnnnnnnnnnnnnnnnnnnnnnnnnnnnnnnnnnnnnnnnnnnnnnnnnnnnnnnnnnnnnnnnnnnnnnnnnnnnnnnnnnnnnnnnnnnnnnnnnnnnnnnnnnnnnnnnnnnnnnnnnnnnnnnnnnnnnnnnnnnnnnnnnnnnnnnnnnnnnnnnnnnnnnnnnnnnnnnnnnnnnnnnnnnnnnnnnnnnnnnnnnnnnnnnnnnnnnnnnnnnnnnnnnnnnnnnnnnnnnnnnnnnnnnnnnnnnnnnnnnnnnnnnnnnnnnnnnnnnnnnnnnnnnnnnnnnnnnnnnnnnnnnnnnnnnnnnnnnnnnnnnnnnnnnnnnnnnnnnnnnnnnnnnnnnnnnnnnnnnnnnnnnnnnnnnnnnnnnnnnnnnnnnnnnnnnnnnnnnnnnnnnnnnnnnnnnnnnnnnnnnnnnnnnnnnnnnnnnnnnnnnnnnnnnnnnnnnnnnnnnnnnnnnnnnnnnnnnnnnnnnnnnnnnnnnnnnnnnnnnnnnnnnnnnnnnnnnnnnnnnnnnnnnnnnnnnnnnnnnnnnnnnnnnnnnnnnnnnnnnnnnnnnnnnnnnnnnnnnnnnnnnnnnnnnnnnnnnnnnnnnnnnnnnnnnnnnnnnnnnnnnnnnnnnnnnnnnnnnnnnnnnnnnnnnnnnnnnnnnnnnnnnnnnnnnnnnnnnnnnnnnnnnnnnnnnnnnnnnnnnnnnnnnnnnnnnnnnnnnnnnnnnnnnnnnnnnnnnnnnnnnnnnnnnnnnnnnnnnnnnnnnnnnnnnnnnnnnnnnnnnnnnnnnnnnnnnnnnnnnnnnnnnnnnnnnnnnnnnnnnnnnnnnnnnnnnnnnnnnnnnnnnnnnnnnnnnnnnnnnnnnnnnnnnnnnnnnnnnnnnnnnnnnnnnnnnnnnnnnnnnnnnnnnnnnnnnnnnnnnnnnnnnnnnnnnnnnnnnnnnnnnnnnnnnnnnnnnnnnnnnnnnnnnnnnnnnnnnnnnnnnnnnnnnnnnnnnnnnnnnnnnnnnnnnnnnnnnnnnnnnnnnnnnnnnnnnnnnnnnnnnnnnnnnnnnnnnnnnnnnnnnnnnnnnnnnnnnnnnnnnnnnnnnnnnnnnnnnnnnnnnnnnnnnnnnnnnnnnnnnnnnnnnnnnnnnnnnnnnnnnnnnnnnnnnnnnnnnnnnnnnnnnnnnnnnnnnnnnnnnnnnnnnnnnnnnnnnnnnnnnnnnnnnnnnnnnnnnnnnnnnnnnnnnnnnnnnnnnnnnnnnnnnnnnnnnnnnnnnnnnnnnnnnnnnnnnnnnnnnnnnnnnnnnnnnnnnnnnnnnnnnnnnnnnnnnnnnnnnnnnnnnnnnnnnnnnnnnnnnnnnnnnnnnnnnnnnnnnnnnnnnnnnnnnnnnnnnnnnnnnnnnnnnnnnnnnnnnnnnnnnnnnnnnnnnnnnnnnnnnnnnnnnnnnnnnnnnnnnnnnnnnnnnnnnnnnnnnnnnnnnnnnnnnnnnnnnnnnnnnnnnnnnnnnnnnnnnnnnnnnnnnnnnnnnnnnnnnnnnnnnnnnnnnnnnnnnnnnnnnnnnnnnnnnnnnnnnnnnnnnnnnnnnnnnnnnnnnnnnnnnnnnnnnnnnnnnnnnnnnnnnnnnnnnnnnnnnnnnnnnnnnnnnnnnnnnnnnnnnnnnnnnnnnnnnnnnnnnnnnnnnnnnnnnnnnnnnnnnnnnnnnnnnnnnnnnnnnnnnnnnnnnnnnnnnnnnnnnnnnnnnnnnnnnnnnnnnnnnnnnnnnnnnnnnnnnnnnnnnnnnnnnnnnnnnnnnnnnnnnnnnnnnnnnnnnnnnnnnnnnnnnnnnnnnnnnnnnnnnnnnnnnnnnnnnnnnnnnnnnnnnnnnnnnnnnnnnnnnnnnnnnnnnnnnnnnnnnnnnnnnnnnnnnnnnnnnnnnnnnnnnnnnnnnnnnnnnnnnnnnnnnnnnnnnnnnnnnnnnnnnnnnnnnnnnnnnnnnnnnnnnnnnnnnnnnnnnnnnnnnnnnnnnnnnnnnnnnnnnnnnnnnnnnnnnnnnnnnnnnnnnnnnnnnnnnnnnnnnnnnnnnnnnnnnnnnnnnnnnnnnnnnnnnnnnnnnnnnnnnnnnnnnnnnnnnnnnnnnnnnnnnnnnnnnnnnnnnnnnnnnnnnnnnnnnnnnnnnnnnnnnnnnnnnnnnnnnnnnnnnnnnnnnnnnnnnnnnnnnnnnnnnnnnnnnnnnnnnnnnnnnnnnnnnnnnnnnnnnnnnnnnnnnnnnnnnnnnnnnnnnnnnnnnnnnnnnnnnnnnnnnnnnnnnnnnnnnnnnnnnnnnnnnnnnnnnnnnnnnnnnnnnnnnnnnnnnnnnnnnnnnnnnnnnnnnnnnnnnnnnnnnnnnnnnnnnnnnnnnnnnnnnnnnnnnnnnnnnnnnnnnnnnnnnnnnnnnnnnnnnnnnnnnnnnnnnnnnnnnnnnnnnnnnnnnnnnnnnnnnnnnnnnnnnnnnnnnnnnnnnnnnnnnnnnnnnnnnnnnnnnnnnnnnnnnnnnnnnnnnnnnnnnnnnnnnnnnnnnnnnnnnnnnnnnnnnnnnnnnnnnnnnnnnnnnnnnnnnnnnnnnnnnnnnnnnnnnnnnnnnnnnnnnnnnnnnnnnnnnnnnnnnnnnnnnnnnnnnnnnnnnnnnnnnnnnnnnnnnnnnnnnnnnnnnnnnnnnnnnnnnnnnnnnnnnnnnnnnnnnnnnnnnnnnnnnnnnnnnnnnnnnnnnnnnnnnnnnnnnnnnnnnnnnnnnnnnnnnnnnnnnnnnnnnnnnnnnnnnnnnnnnnnnnnnnnnnnnnnnnnnnnnnnnnnnnnnnnnnnnnnnnnnnnnnnnnnnnnnnnnnnnnnnnnnnnnnnnnnnnnnnnnnnnnnnnnnnnnnnnnnnnnnnnnnnnnnnnnnnnnnnnnnnnnnnnnnnnnnnnnnnnnnnnnnnnnnnnnnnnnnnnnnnnnnnnnnnnnnnnnnnnnnnnnnnnnnnnnnnnnnnnnnnnnnnnnnnnnnnnnnnnnnnnnnnnnnnnnnnnnnnnnnnnnnnnnnnnnnnnnnnnnnnnnnnnnnnnnnnnnnnnnnnnnnnnnnnnnnnnnnnnnnnnnnnnnnnnnnnnnnnnnnnnnnnnnnnnnnnnnnnnnnnnnnnnnnnnnnnnnnnnnnnnnnnnnnnnnnnnnnnnnnnnnnnnnnnnnnnnnnnnnnnnnnnnnnnnnnnnnnnnnnnnnnnnnnnnnnnnnnnnnnnnnnnnnnnnnnnnnnnnnnnnnnnnnnnnnnnnnnnnnnnnnnnnnnnnnnnnnnnnnnnnnnnnnnnnnnnnnnnnnnnnnnnnnnnnnnnnnnnnnnnnnnnnnnnnnnnnnnnnnnnnnnnnnnnnnnnnnnnnnnnnnnnnnnnnnnnnnnnnnnnnnnnnnnnnnnnnnnnnnnnnnnnnnnnnnnnnnnnnnnnnnnnnnnnnnnnnnnnnnnnnnnnnnnnnnnnnnnnnnnnnnnnnnnnnnnnnnnnnnnnnnnnnnnnnnnnnnnnnnnnnnnnnnnnnnnnnnnnnnnnnnnnnnnnnnnnnnnnnnnnnnnnnnnnnnnnnnnnnnnnnnnnnnnnnnnnnnnnnnnnnnnnnnnnnnnnnnnnnnnnnnnnnnnnnnnnnnnnnnnnnnnnnnnnnnnnnnnnnnnnnnnnnnnnnnnnnnnnnnnnnnnnnnnnnnnnnnnnnnnnnnnnnnnnnnnnnnnnnnnnnnnnnnnnnnnnnnnnnnnnnnnnnnnnnnnnnnnnnnnnnnnnnnnnnnnnnnnnnnnnnnnnnnnnnnnnnnnnnnnnnnnnnnnnnnnnnnnnnnnnnnnnnnnnnnnnnnnnnnnnnnnnnnnnnnnnnnnnnnnnnnnnnnnnnnnnnnnnnnnnnnnnnnnnnnnnnnnnnnnnnnnnnnnnnnnnnnnnnnnnnnnnnnnnnnnnnnnnnnnnnnnnnnnnnnnnnnnnnnnnnnnnnnnnnnnnnnnnnnnnnnnnnnnnnnnnnnnnnnnnnnnnnnnnnnnnnnnnnnnnnnnnnnnnnnnnnnnnnnnnnnnnnnnnnnnnnnnnnnnnnnnnnnnnnnnnnnnnnnnnnnnnnnnnnnnnnnnnnnnnnnnnnnnnnnnnnnnnnnnnnnnnnnnnnnnnnnnnnnnnnnnnnnnnnnnnnnnnnnnnnnnnnnnnnnnnnnnnnnnnnnnnnnnnnnnnnnnnnnnnnnnnnnnnnnnnnnnnnnnnnnnnnnnnnnnnnnnnnnnnnnnnnnnnnnnnnnnnnnnnnnnnnnnnnnnnnnnnnnnnnnnnnnnnnnnnnnnnnnnnnnnnnnnnnnnnnnnnnnnnnnnnnnnnnnnnnnnnnnnnnnnnnnnnnnnnnnnnnnnnnnnnnnnnnnnnnnnnnnnnnnnnnnnnnnnnnnnnnnnnnnnnnnnnnnnnnnnnnnnnnnnnnnnnnnnnnnnnnnnnnnnnnnnnnnnnnnnnnnnnnnnnnnnnnnnnnnnnnnnnnnnnnnnnnnnnnnnnnnnnnnnnnnnnnnnnnnnnnnnnnnnnnnnnnnnnnnnnnnnnnnnnnnnnnnnnnnnnnnnnnnnnnnnnnnnnnnnnnnnnnnnnnnnnnnnnnnnnnnnnnnnnnnnnnnnnnnnnnnnnnnnnnnnnnnnnnnnnnnnnnnnnnnnnnnnnnnnnnnnnnnnnnnnnnnnnnnnnnnnnnnnnnnnnnnnnnnnnnnnnnnnnnnnnnnnnnnnnnnnnnnnnnnnnnnnnnnnnnnnnnnnnnnnnnnnnnnnnnnnnnnnnnnnnnnnnnnnnnnnnnnnnnnnnnnnnnnnnnnnnnnnnnnnnnnnnnnnnnnnnnnnnnnnnnnnnnnnnnnnnnnnnnnnnnnnnnnnnnnnnnnnnnnnnnnnnnnnnnnnnnnnnnnnnnnnnnnnnnnnnnnnnnnnnnnnnnnnnnnnnnnnnnnnnnnnnnnnnnnnnnnnnnnnnnnnnnnnnnnnnnnnnnnnnnnnnnnnnnnnnnnnnnnnnnnnnnnnnnnnnnnnnnnnnnnnnnnnnnnnnnnnnnnnnnnnnnnnnnnnnnnnnnnnnnnnnnnnnnnnnnnnnnnnnnnnnnnnnnnnnnnnnnnnnnnnnnnnnnnnnnnnnnnnnnnnnnnnnnnnnnnnnnnnnnnnnnnnnnnnnnnnnnnnnnnnnnnnnnnnnnnnnnnnnnnnnnnnnnnnnnnnnnnnnnnnnnnnnnnnnnnnnnnnnnnnnnnnnnnnnnnnnnnnnnnnnnnnnnnnnnnnnnnnnnnnnnnnnnnnnnnnnnnnnnnnnnnnnnnnnnnnnnnnnnnnnnnnnnnnnnnnnnnnnnnnnnnnnnnnnnnnnnnnnnnnnnnnnnnnnnnnnnnnnnnnnnnnnnnnnnnnnnnnnnnnnnnnnnnnnnnnnnnnnnnnnnnnnnnnnnnnnnnnnnnnnnnnnnnnnnnnnnnnnnnnnnnnnnnnnnnnnnnnnnnnnnnnnnnnnnnnnnnnnnnnnnnnnnnnnnnnnnnnnnnnnnnnnnnnnnnnnnnnnnnnnnnnnnnnnnnnnnnnnnnnnnnnnnnnnnnnnnnnnnnnnnnnnnnnnnnnnnnnnnnnnnnnnnnnnnnnnnnnnnnnnnnnnnnnnnnnnnnnnnnnnnnnnnnnnnnnnnnnnnnnnnnnnnnnnnnnnnnnnnnnnnnnnnnnnnnnnnnnnnnnnnnnnnnnnnnnnnnnnnnnnnnnnnnnnnnnnnnnnnnnnnnnnnnnnnnnnnnnnnnnnnnnnnnnnnnnnnnnnnnnnnnnnnnnnnnnnnnnnnnnnnnnnnnnnnnnnnnnnnnnnnnnnnnnnnnnnnnnnnnnnnnnnnnnnnnnnnnnnnnnnnnnnnnnnnnnnnnnnnnnnnnnnnnnnnnnnnnnnnnnnnnnnnnnnnnnnnnnnnnnnnnnnnnnnnnnnnnnnnnnnnnnnnnnnnnnnnnnnnnnnnnnnnnnnnnnnnnnnnnnnnnnnnnnnnnnnnnnnnnnnnnnnnnnnnnnnnnnnnnnnnnnnnnnnnnnnnnnnnnnnnnnnnnnnnnnnnnnnnnnnnnnnnnnnnnnnnnnnnnnnnnnnnnnnnnnnnnnnnnnnnnnnnnnnnnnnnnnnnnnnnnnnnnnnnnnnnnnnnnnnnnnnnnnnnnnnnnnnnnnnnnnnnnnnnnnnnnnnnnnnnnnnnnnnnnnnnnnnnnnnnnnnnnnnnnnnnnnnnnnnnnnnnnnnnnnnnnnnnnnnnnnnnnnnnnnnnnnnnnnnnnnnnnnnnnnnnnnnnnnnnnnnnnnnnnnnnnnnnnnnnnnnnnnnnnnnnnnnnnnnnnnnnnnnnnnnnnnnnnnnnnnnnnnnnnnnnnnnnnnnnnnnnnnnnnnnnnnnnnnnnnnnnnnnnnnnnnnnnnnnnnnnnnnnnnnnnnnnnnnnnnnnnnnnnnnnnnnnnnnnnnnnnnnnnnnnnnnnnnnnnnnnnnnnnnnnnnnnnnnnnnnnnnnnnnnnnnnnnnnnnnnnnnnnnnnnnnnnnnnnnnnnnnnnnnnnnnnnnnnnnnnnnnnnnnnnnnnnnnnnnnnnnnnnnnnnnnnnnnnnnnnnnnnnnnnnnnnnnnnnnnnnnnnnnnnnnnnnnnnnnnnnnnnnnnnnnnnnnnnnnnnnnnnnnnnnnnnnnnnnnnnnnnnnnnnnnnnnnnnnnnnnnnnnnnnnnnnnnnnnnnnnnnnnnnnnnnnnnnnnnnnnnnnnnnnnnnnnnnnnnnnnnnnnnnnnnnnnnnnnnnnnnnnnnnnnnnnnnnnnnnnnnnnnnnnnnnnnnnnnnnnnnnnnnnnnnnnnnnnnnnnnnnnnnnnnnnnnnnnnnnnnnnnnnnnnnnnnnnnnnnnnnnnnnnnnnnnnnnnnnnnnnnnnnnnnnnnnnnnnnnnnnnnnnnnnnnnnnnnnnnnnnnnnnnnnnnnnnnnnnnnnnnnnnnnnnnnnnnnnnnnnnnnnnnnnnnnnnnnnnnnnnnnnnnnnnnnnnnnnnnnnnnnnnnnnnnnnnnnnnnnnnnnnnnnnnnnnnnnnnnnnnnnnnnnnnnnnnnnnnnnnnnnnnnnnnnnnnnnnnnnnnnnnnnnnnnnnnnnnnnnnnnnnnnnnnnnnnnnnnnnnnnnnnnnnnnnnnnnnnnnnnnnnnnnnnnnnnnnnnnnnnnnnnnnnnnnnnnnnnnnnnnnnnnnnnnnnnnnnnnnnnnnnnnnnnnnnnnnnnnnnnnnnnnnnnnnnnnnnnnnnnnnnnnnnnnnnnnnnnnnnnnnnnnnnnnnnnnnnnnnnnnnnnnnnnnnnnnnnnnnnnnnnnnnnnnnnnnnnnnnnnnnnnnnnnnnnnnnnnnnnnnnnnnnnnnnnnnnnnnnnnnnnnnnnnnnnnnnnnnnnnnnnnnnnnnnnnnnnnnnnnnnnnnnnnnnnnnnnnnnnnnnnnnnnnnnnnnnnnnnnnnnnnnnnnnnnnnnnnnnnnnnnnnnnnnnnnnnnnnnnnnnnnnnnnnnnnnnnnnnnnnnnnnnnnnnnnnnnnnnnnnnnnnnnnnnnnnnnnnnnnnnnnnnnnnnnnnnnnnnnnnnnnnnnnnnnnnnnnnnnnnnnnnnnnnnnnnnnnnnnnnnnnnnnnnnnnnnnnnnnnnnnnnnnnnnnnnnnnnnnnnnnnnnnnnnnnnnnnnnnnnnnnnnnnnnnnnnnnnnnnnnnnnnnnnnnnnnnnnnnnnnnnnnnnnnnnnnnnnnnnnnnnnnnnnnnnnnnnnnnnnnnnnnnnnnnnnnnnnnnnnnnnnnnnnnnnnnnnnnnnnnnnnnnnnnnnnnnnnnnnnnnnnnnnnnnnnnnnnnnnnnnnnnnnnnnnnnnnnnnnnnnnnnnnnnnnnnnnnnnnnnnnnnnnnnnnnnnnnnnnnnnnnnnnnnnnnnnnnnnnnnnnnnnnnnnnnnnnnnnnnnnnnnnnnnnnnnnnnnnnnnnnnnnnnnnnnnnnnnnnnnnnnnnnnnnnnnnnnnnnnnnnnnnnnnnnnnnnnnnnnnnnnnnnnnnnnnnnnnnnnnnnnnnnnnnnnnnnnnnnnnnnnnnnnnnnnnnnnnnnnnnnnnnnnnnnnnnnnnnnnnnnnnnnnnnnnnnnnnnnnnnnnnnnnnnnnnnnnnnnnnnnnnnnnnnnnnnnnnnnnnnnnnnnnnnnnnnnnnnnnnnnnnnnnnnnnnnnnnnnnnnnnnnnnnnnnnnnnnnnnnnnnnnnnnnnnnnnnnnnnnnnnnnnnnnnnnnnnnnnnnnnnnnnnnnnnnnnnnnnnnnnnnnnnnnnnnnnnnnnnnnnnnnnnnnnnnnnnnnnnnnnnnnnnnnnnnnnnnnnnnnnnnnnnnnnnnnnnnnnnnnnnnnnnnnnnnnnnnnnnnnnnnnnnnnnnnnnnnnnnnnnnnnnnnnnnnnnnnnnnnnnnnnnnnnnnnnnnnnnnnnnnnnnnnnnnnnnnnnnnnnnnnnnnnnnnnnnnnnnnnnnnnnnnnnnnnnnnnnnnnnnnnnnnnnnnnnnnnnnnnnnnnnnnnnnnnnnnnnnnnnnnnnnnnnnnnnnnnnnnnnnnnnnnnnnnnnnnnnnnnnnnnnnnnnnnnnnnnnnnnnnnnnnnnnnnnnnnnnnnnnnnnnnnnnnnnnnnnnnnnnnnnnnnnnnnnnnnnnnnnnnnnnnnnnnnnnnnnnnnnnnnnnnnnnnnnnnnnnnnnnnnnnnnnnnnnnnnnnnnnnnnnnnnnnnnnnnnnnnnnnnnnnnnnnnnnnnnnnnnnnnnnnnnnnnnnnnnnnnnnnnnnnnnnnnnnnnnnnnnnnnnnnnnnnnnnnnnnnnnnnnnnnnnnnnnnnnnnnnnnnnnnnnnnnnnnnnnnnnnnnnnnnnnnnnnnnnnnnnnnnnnnnnnnnnnnnnnnnnnnnnnnnnnnnnnnnnnnnnnnnnnnnnnnnnnnnnnnnnnnnnnnnnnnnnnnnnnnnnnnnnnnnnnnnnnnnnnnnnnnnnnnnnnnnnnnnnnnnnnnnnnnnnnnnnnnnnnnnnnnnnnnnnnnnnnnnnnnnnnnnnnnnnnnnnnnnnnnnnnnnnnnnnnnnnnnnnnnnnnnnnnnnnnnnnnnnnnnnnnnnnnnnnnnnnnnnnnnnnnnnnnnnnnnnnnnnnnnnnnnnnnnnnnnnnnnnnnnnnnnnnnnnnnnnnnnnnnnnnnnnnnnnnnnnnnnnnnnnnnnnnnnnnnnnnnnnnnnnnnnnnnnnnnnnnnnnnnnnnnnnnnnnnnnnnnnnnnnnnnnnnnnnnnnnnnnnnnnnnnnnnnnnnnnnnnnnnnnnnnnnnnnnnnnnnnnnnnnnnnnnnnnnnnnnnnnnnnnnnnnnnnnnnnnnnnnnnnnnnnnnnnnnnnnnnnnnnnnnnnnnnnnnnnnnnnnnnnnnnnnnnnnnnnnnnnnnnnnnnnnnnnnnnnnnnnnnnnnnnnnnnnnnnnnnnnnnnnnnnnnnnnnnnnnnnnnnnnnnnnnnnnnnnnnnnnnnnnnnnnnnnnnnnnnnnnnnnnnnnnnnnnnnnnnnnnnnnnnnnnnnnnnnnnnnnnnnnnnnnnnnnnnnnnnnnnnnnnnnnnnnnnnnnnnnnnnnnnnnnnnnnnnnnnnnnnnnnnnnnnnnnnnnnnnnnnnnnnnnnnnnnnnnnnnnnnnnnnnnnnnnnnnnnnnnnnnnnnnnnnnnnnnnnnnnnnnnnnnnnnnnnnnnnnnnnnnnnnnnnnnnnnnnnnnnnnnnnnnnnnnnnnnnnnnnnnnnnnnnnnnnnnnnnnnnnnnnnnnnnnnnnnnnnnnnnnnnnnnnnnnnnnnnnnnnnnnnnnnnnnnnnnnnnnnnnnnnnnnnnnnnnnnnnnnnnnnnnnnnnnnnnnnnnnnnnnnnnnnnnnnnnnnnnnnnnnnnnnnnnnnnnnnnnnnnnnnnnnnnnnnnnnnnnnnnnnnnnnnnnnnnnnnnnnnnnnnnnnnnnnnnnnnnnnnnnnnnnnnnnnnnnnnnnnnnnnnnnnnnnnnnnnnnnnnnnnnnnnnnnnnnnnnnnnnnnnnnnnnnnnnnnnnnnnnnnnnnnnnnnnnnnnnnnnnnnnnnnnnnnnnnnnnnnnnnnnnnnnnnnnnnnnnnnnnnnnnnnnnnnnnnnnnnnnnnnnnnnnnnnnnnnnnnnnnnnnnnnnnnnnnnnnnnnnnnnnnnnnnnnnnnnnnnnnnnnnnnnnnnnnnnnnnnnnnnnnnnnnnnnnnnnnnnnnnnnnnnnnnnnnnnnnnnnnnnnnnnnnnnnnnnnnnnnnnnnnnnnnnnnnnnnnnnnnnnnnnnnnnnnnnnnnnnnnnnnnnnnnnnnnnnnnnnnnnnnnnnnnnnnnnnnnnnnnnnnnnnnnnnnnnnnnnnnnnnnnnnnnnnnnnnnnnnnnnnnnnnnnnnnnnnnnnnnnnnnnnnnnnnnnnnnnnnnnnnnnnnnnnnnnnnnnnnnnnnnnnnnnnnnnnnnnnnnnnnnnnnnnnnnnnnnnnnnnnnnnnnnnnnnnnnnnnnnnnnnnnnnnnnnnnnnnnnnnnnnnnnnnnnnnnnnnnnnnnnnnnnnnnnnnnnnnnnnnnnnnnnnnnnnnnnnnnnnnnnnnnnnnnnnnnnnnnnnnnnnnnnnnnnnnnnnnnnnnnnnnnnnnnnnnnnnnnnnnnnnnnnnnnnnnnnnnnnnnnnnnnnnnnnnnnnnnnnnnnnnnnnnnnnnnnnnnnnnnnnnnnnnnnnnnnnnnnnnnnnnnnnnnnnnnnnnnnnnnnnnnnnnnnnnnnnnnnnnnnnnnnnnnnnnnnnnnnnnnnnnnnnnnnnnnnnnnnnnnnnnnnnnnnnnnnnnnnnnnnnnnnnnnnnnnnnnnnnnnnnnnnnnnnnnnnnnnnnnnnnnnnnnnnnnnnnnnnnnnnnnnnnnnnnnnnnnnnnnnnnnnnnnnnnnnnnnnnnnnnnnnnnnnnnnnnnnnnnnnnnnnnnnnnnnnnnnnnnnnnnnnnnnnnnnnnnnnnnnnnnnnnnnnnnnnnnnnnnnnnnnnnnnnnnnnnnnnnnnnnnnnnnnnnnnnnnnnnnnnnnnnnnnnnnnnnnnnnnnnnnnnnnnnnnnnnnnnnnnnnnnnnnnnnnnnnnnnnnnnnnnnnnnnnnnnnnnnnnnnnnnnnnnnnnnnnnnnnnnnnnnnnnnnnnnnnnnnnnnnnnnnnnnnnnnnnnnnnnnnnnnnnnnnnnnnnnnnnnnnnnnnnnnnnnnnnnnnnnnnnnnnnnnnnnnnnnnnnnnnnnnnnnnnnnnnnnnnnnnnnnnnnnnnnnnnnnnnnnnnnnnnnnnnnnnnnnnnnnnnnnnnnnnnnnnnnnnnnnnnnnnnnnnnnnnnnnnnnnnnnnnnnnnnnnnnnnnnnnnnnnnnnnnnnnnnnnnnnnnnnnnnnnnnnnnnnnnnnnnnnnnnnnnnnnnnnnnnnnnnnnnnnnnnnnnnnnnnnnnnnnnnnnnnnnnnnnnnnnnnnnnnnnnnnnnnnnnnnnnnnnnnnnnnnnnnnnnnnnnnnnnnnnnnnnnnnnnnnnnnnnnnnnnnnnnnnnnnnnnnnnnnnnnnnnnnnnnnnnnnnnnnnnnnnnnnnnnnnnnnnnnnnnnnnnnnnnnnnnnnnnnnnnnnnnnnnnnnnnnnnnnnnnnnnnnnnnnnnnnnnnnnnnnnnnnnnnnnnnnnnnnnnnnnnnnnnnnnnnnnnnnnnnnnnnnnnnnnnnnnnnnnnnnnnnnnnnnnnnnnnnnnnnnnnnnnnnnnnnnnnnnnnnnnnnnnnnnnnnnnnnnnnnnnnnnnnnnnnnnnnnnnnnnnnnnnnnnnnnnnnnnnnnnnnnnnnnnnnnnnnnnnnnnnnnnnnnnnnnnnnnnnnnnnnnnnnnnnnnnnnnnnnnnnnnnnnnnnnnnnnnnnnnnnnnnnnnnnnnnnnnnnnnnnnnnnnnnnnnnnnnnnnnnnnnnnnnnnnnnnnnnnnnnnnnnnnnnnnnnnnnnnnnnnnnnnnnnnnnnnnnnnnnnnnnnnnnnnnnnnnnnnnnnnnnnnnnnnnnnnnnnnnnnnnnnnnnnnnnnnnnnnnnnnnnnnnnnnnnnnnnnnnnnnnnnnnnnnnnnnnnnnnnnnnnnnnnnnnnnnnnnnnnnnnnnnnnnnnnnnnnnnnnnnnnnnnnnnnnnnnnnnnnnnnnnnnnnnnnnnnnnnnnnnnnnnnnnnnnnnnnnnnnnnnnnnnnnnnnnnnnnnnnnnnnnnnnnnnnnnnnnnnnnnnnnnnnnnnnnnnnnnnnnnnnnnnnnnnnnnnnnnnnnnnnnnnnnnnnnnnnnnnnnnnnnnnnnnnnnnnnnnnnnnnnnnnnnnnnnnnnnnnnnnnnnnnnnnnnnnnnnnnnnnnnnnnnnnnnnnnnnnnnnnnnnnnnnnnnnnnnnnnnnnnnnnnnnnnnnnnnnnnnnnnnnnnnnnnnnnnnnnnnnnnnnnnnnnnnnnnnnnnnnnnnnnnnnnnnnnnnnnnnnnnnnnnnnnnnnnnnnnnnnnnnnnnnnnnnnnnnnnnnnnnnnnnnnnnnnnnnnnnnnnnnnnnnnnnnnnnnnnnnnnnnnnnnnnnnnnnnnnnnnnnnnnnnnnnnnnnnnnnnnnnnnnnnnnnnnnnnnnnnnnnnnnnnnnnnnnnnnnnnnnnnnnnnnnnnnnnnnnnnnnnnnnnnnnnnnnnnnnnnnnnnnnnnnnnnnnnnnnnnnnnnnnnnnnnnnnnnnnnnnnnnnnnnnnnnnnnnnnnnnnnnnnnnnnnnnnnnnnnnnnnnnnnnnnnnnnnnnnnnnnnnnnnnnnnnnnnnnnnnnnnnnnnnnnnnnnnnnnnnnnnnnnnnnnnnnnnnnnnnnnnnnnnnnnnnnnnnnnnnnnnnnnnnnnnnnnnnnnnnnnnnnnnnnnnnnnnnnnnnnnnnnnnnnnnnnnnnnnnnnnnnnnnnnnnnnnnnnnnnnnnnnnnnnnnnnnnnnnnnnnnnnnnnnnnnnnnnnnnnnnnnnnnnnnnnnnnnnnnnnnnnnnnnnnnnnnnnnnnnnnnnnnnnnnnnnnnnnnnnnnnnnnnnnnnnnnnnnnnnnnnnnnnnnnnnnnnnnnnnnnnnnnnnnnnnnnnnnnnnnnnnnnnnnnnnnnnnnnnnnnnnnnnnnnnnnnnnnnnnnnnnnnnnnnnnnnnnnnnnnnnnnnnnnnnnnnnnnnnnnnnnnnnnnnnnnnnnnnnnnnnnnnnnnnnnnnnnnnnnnnnnnnnnnnnnnnnnnnnnnnnnnnnnnnnnnnnnnnnnnnnnnnnnnnnnnnnnnnnnnnnnnnnnnnnnnnnnnnnnnnnnnnnnnnnnnnnnnnnnnnnnnnnnnnnnnnnnnnnnnnnnnnnnnnnnnnnnnnnnnnnnnnnnnnnnnnnnnnnnnnnnnnnnnnnnnnnnnnnnnnnnnnnnnnnnnnnnnnnnnnnnnnnnnnnnnnnnnnnnnnnnnnnnnnnnnnnnnnnnnnnnnnnnnnnnnnnnnnnnnnnnnnnnnnnnnnnnnnnnnnnnnnnnnnnnnnnnnnnnnnnnnnnnnnnnnnnnnnnnnnnnnnnnnnnnnnnnnnnnnnnnnnnnnnnnnnnnnnnnnnnnnnnnnnnnnnnnnnnnnnnnnnnnnnnnnnnnnnnnnnnnnnnnnnnnnnnnnnnnnnnnnnnnnnnnnnnnnnnnnnnnnnnnnnnnnnnnnnnnnnnnnnnnnnnnnnnnnnnnnnnnnnnnnnnnnnnnnnnnnnnnnnnnnnnnnnnnnnnnnnnnnnnnnnnnnnnnnnnnnnnnnnnnnnnnnnnnnnnnnnnnnnnnnnnnnnnnnnnnnnnnnnnnnnnnnnnnnnnnnnnnnnnnnnnnnnnnnnnnnnnnnnnnnnnnnnnnnnnnnnnnnnnnnnnnnnnnnnnnnnnnnnnnnnnnnnnnnnnnnnnnnnnnnnnnnnnnnnnnnnnnnnnnnnnnnnnnnnnnnnnnnnnnnnnnnnnnnnnnnnnnnnnnnnnnnnnnnnnnnnnnnnnnnnnnnnnnnnnnnnnnnnnnnnnnnnnnnnnnnnnnnnnnnnnnnnnnnnnnnnnnnnnnnnnnnnnnnnnnnnnnnnnnnnnnnnnnnnnnnnnnnnnnnnnnnnnnnnnnnnnnnnnnnnnnnnnnnnnnnnnnnnnnnnnnnnnnnnnnnnnnnnnnnnnnnnnnnnnnnnnnnnnnnnnnnnnnnnnnnnnnnnnnnnnnnnnnnnnnnnnnnnnnnnnnnnnnnnnnnnnnnnnnnnnnnnnnnnnnnnnnnnnnnnnnnnnnnnnnnnnnnnnnnnnnnnnnnnnnnnnnnnnnnnnnnnnnnnnnnnnnnnnnnnnnnnnnnnnnnnnnnnnnnnnnnnnnnnnnnnnnnnnnnnnnnnnnnnnnnnnnnnnnnnnnnnnnnnnnnnnnnnnnnnnnnnnnnnnnnnnnnnnnnnnnnnnnnnnnnnnnnnnnnnnnnnnnnnnnnnnnnnnnnnnnnnnnnnnnnnnnnnnnnnnnnnnnnnnnnnnnnnnnnnnnnnnnnnnnnnnnnnnnnnnnnnnnnnnnnnnnnnnnnnnnnnnnnnnnnnnnnnnnnnnnnnnnnnnnnnnnnnnnnnnnnnnnnnnnnnnnnnnnnnnnnnnnnnnnnnnnnnnnnnnnnnnnnnnnnnnnnnnnnnnnnnnnnnnnnnnnnnnnnnnnnnnnnnnnnnnnnnnnnnnnnnnnnnnnnnnnnnnnnnnnnnnnnnnnnnnnnnnnnnnnnnnnnnnnnnnnnnnnnnnnnnnnnnnnnnnnnnnnnnnnnnnnnnnnnnnnnnnnnnnnnnnnnnnnnnnnnnnnnnnnnnnnnnnnnnnnnnnnnnnnnnnnnnnnnnnnnnnnnnnnnnnnnnnnnnnnnnnnnnnnnnnnnnnnnnnnnnnnnnnnnnnnnnnnnnnnnnnnnnnnnnnnnnnnnnnnnnnnnnnnnnnnnnnnnnnnnnnnnnnnnnnnnnnnnnnnnnnnnnnnnnnnnnnnnnnnnnnnnnnnnnnnnnnnnnnnnnnnnnnnnnnnnnnnnnnnnnnnnnnnnnnnnnnnnnnnnnnnnnnnnnnnnnnnnnnnnnnnnnnnnnnnnnnnnnnnnnnnnnnnnnnnnnnnnnnnnnnnnnnnnnnnnnnnnnnnnnnnnnnnnnnnnnnnnnnnnnnnnnnnnnnnnnnnnnnnnnnnnnnnnnnnnnnnnnnnnnnnnnnnnnnnnnnnnnnnnnnnnnnnnnnnnnnnnnnnnnnnnnnnnnnnnnnnnnnnnnnnnnnnnnnnnnnnnnnnnnnnnnnnnnnnnnnnnnnnnnnnnnnnnnnnnnnnnnnnnnnnnnnnnnnnnnnnnnnnnnnnnnnnnnnnnnnnnnnnnnnnnnnnnnnnnnnnnnnnnnnnnnnnnnnnnnnnnnnnnnnnnnnnnnnnnnnnnnnnnnnnnnnnnnnnnnnnnnnnnnnnnnnnnnnnnnnnnnnnnnnnnnnnnnnnnnnnnnnnnnnnnnnnnnnnnnnnnnnnnnnnnnnnnnnnnnnnnnnnnnnnnnnnnnnnnnnnnnnnnnnnnnnnnnnnnnnnnnnnnnnnnnnnnnnnnnnnnnnnnnnnnnnnnnnnnnnnnnnnnnnnnnnnnnnnnnnnnnnnnnnnnnnnnnnnnnnnnnnnnnnnnnnnnnnnnnnnnnnnnnnnnnnnnnnnnnnnnnnnnnnnnnnnnnnnnnnnnnnnnnnnnnnnnnnnnnnnnnnnnnnnnnnnnnnnnnnnnnnnnnnnnnnnnnnnnnnnnnnnnnnnnnnnnnnnnnnnnnnnnnnnnnnnnnnnnnnnnnnnnnnnnnnnnnnnnnnnnnnnnnnnnnnnnnnnnnnnnnnnnnnnnnnnnnnnnnnnnnnnnnnnnnnnnnnnnnnnnnnnnnnnnnnnnnnnnnnnnnnnnnnnnnnnnnnnnnnnnnnnnnnnnnnnnnnnnnnnnnnnnnnnnnnnnnnnnnnnnnnnnnnnnnnnnnnnnnnnnnnnnnnnnnnnnnnnnnnnnnnnnnnnnnnnnnnnnnnnnnnnnnnnnnnnnnnnnnnnnnnnnnnnnnnnnnnnnnnnnnnnnnnnnnnnnnnnnnnnnnnnnnnnnnnnnnnnnnnnnnnnnnnnnnnnnnnnnnnnnnnnnnnnnnnnnnnnnnnnnnnnnnnnnnnnnnnnnnnnnnnnnnnnnnnnnnnnnnnnnnnnnnnnnnnnnnnnnnnnnnnnnnnnnnnnnnnnnnnnnnnnnnnnnnnnnnnnnnnnnnnnnnnnnnnnnnnnnnnnnnnnnnnnnnnnnnnnnnnnnnnnnnnnnnnnnnnnnnnnnnnnnnnnnnnnnnnnnnnnnnnnnnnnnnnnnnnnnnnnnnnnnnnnnnnnnnnnnnnnnnnnnnnnnnnnnnnnnnnnnnnnnnnnnnnnnnnnnnnnnnnnnnnnnnnnnnnnnnnnnnnnnnnnnnnnnnnnnnnnnnnnnnnnnnnnnnnnnnnnnnnnnnnnnnnnnnnnnnnnnnnnnnnnnnnnnnnnnnnnnnnnnnnnnnnnnnnnnnnnnnnnnnnnnnnnnnnnnnnnnnnnnnnnnnnnnnnnnnnnnnnnnnnnnnnnnnnnnnnnnnnnnnnnnnnnnnnnnnnnnnnnnnnnnnnnnnnnnnnnnnnnnnnnnnnnnnnnnnnnnnnnnnnnnnnnnnnnnnnnnnnnnnnnnnnnnnnnnnnnnnnnnnnnnnnnnnnnnnnnnnnnnnnnnnnnnnnnnnnnnnnnnnnnnnnnnnnnnnnnnnnnnnnnnnnnnnnnnnnnnnnnnnnnnnnnnnnnnnnnnnnnnnnnnnnnnnnnnnnnnnnnnnnnnnnnnnnnnnnnnnnnnnnnnnnnnnnnnnnnnnnnnnnnnnnnnnnnnnnnnnnnnnnnnnnnnnnnnnnnnnnnnnnnnnnnnnnnnnnnnnnnnnnnnnnnnnnnnnnnnnnnnnnnnnnnnnnnnnnnnnnnnnnnnnnnnnnnnnnnnnnnnnnnnnnnnnnnnnnnnnnnnnnnnnnnnnnnnnnnnnnnnnnnnnnnnnnnnnnnnnnnnnnnnnnnnnnnnnnnnnnnnnnnnnnnnnnnnnnnnnnnnnnnnnnnnnnnnnnnnnnnnnnnnnnnnnnnnnnnnnnnnnnnnnnnnnnnnnnnnnnnnnnnnnnnnnnnnnnnnnnnnnnnnnnnnnnnnnnnnnnnnnnnnnnnnnnnnnnnnnnnnnnnnnnnnnnnnnnnnnnnnnnnnnnnnnnnnnnnnnnnnnnnnnnnnnnnnnnnnnnnnnnnnnnnnnnnnnnnnnnnnnnnnnnnnnnnnnnnnnnnnnnnnnnnnnnnnnnnnnnnnnnnnnnnnnnnnnnnnnnnnnnnnnnnnnnnnnnnnnnnnnnnnnnnnnnnnnnnnnnnnnnnnnnnnnnnnnnnnnnnnnnnnnnnnnnnnnnnnnnnnnnnnnnnnnnnnnnnnnnnnnnnnnnnnnnnnnnnnnnnnnnnnnnnnnnnnnnnnnnnnnnnnnnnnnnnnnnnnnnnnnnnnnnnnnnnnnnnnnnnnnnnnnnnnnnnnnnnnnnnnnnnnnnnnnnnnnnnnnnnnnnnnnnnnnnnnnnnnnnnnnnnnnnnnnnnnnnnnnnnnnnnnnnnnnnnnnnnnnnnnnnnnnnnnnnnnnnnnnnnnnnnnnnnnnnnnnnnnnnnnnnnnnnnnnnnnnnnnnnnnnnnnnnnnnnnnnnnnnnnnnnnnnnnnnnnnnnnnnnnnnnnnnnnnnnnnnnnnnnnnnnnnnnnnnnnnnnnnnnnnnnnnnnnnnnnnnnnnnnnnnnnnnnnnnnnnnnnnnnnnnnnnnnnnnnnnnnnnnnnnnnnnnnnnnnnnnnnnnnnnnnnnnnnnnnnnnnnnnnnnnnnnnnnnnnnnnnnnnnnnnnnnnnnnnnnnnnnnnnnnnnnnnnnnnnnnnnnnnnnnnnnnnnnnnnnnnnnnnnnnnnnnnnnnnnnnnnnnnnnnnnnnnnnnnnnnnnnnnnnnnnnnnnnnnnnnnnnnnnnnnnnnnnnnnnnnnnnnnnnnnnnnnnnnnnnnnnnnnnnnnnnnnnnnnnnnnnnnnnnnnnnnnnnnnnnnnnnnnnnnnnnnnnnnnnnnnnnnnnnnnnnnnnnnnnnnnnnnnnnnnnnnnnnnnnnnnnnnnnnnnnnnnnnnnnnnnnnnnnnnnnnnnnnnnnnnnnnnnnnnnnnnnnnnnnnnnnnnnnnnnnnnnnnnnnnnnnnnnnnnnnnnnnnnnnnnnnnnnnnnnnnnnnnnnnnnnnnnnnnnnnnnnnnnnnnnnnnnnnnnnnnnnnnnnnnnnnnnnnnnnnnnnnnnnnnnnnnnnnnnnnnnnnnnnnnnnnnnnnnnnnnnnnnnnnnnnnnnnnnnnnnnnnnnnnnnnnnnnnnnnnnnnnnnnnnnnnnnnnnnnnnnnnnnnnnnnnnnnnnnnnnnnnnnnnnnnnnnnnnnnnnnnnnnnnnnnnnnnnnnnnnnnnnnnnnnnnnnnnnnnnnnnnnnnnnnnnnnnnnnnnnnnnnnnnnnnnnnnnnnnnnnnnnnnnnnnnnnnnnnnnnnnnnnnnnnnnnnnnnnnnnnnnnnnnnnnnnnnnnnnnnnnnnnnnnnnnnnnnnnnnnnnnnnnnnnnnnnnnnnnnnnnnnnnnnnnnnnnnnnnnnnnnnnnnnnnnnnnnnnnnnnnnnnnnnnnnnnnnnnnnnnnnnnnnnnnnnnnnnnnnnnnnnnnnnnnnnnnnnnnnnnnnnnnnnnnnnnnnnnnnnnnnnnnnnnnnnnnnnnnnnnnnnnnnnnnnnnnnnnnnnnnnnnnnnnnnnnnnnnnnnnnnnnnnnnnnnnnnnnnnnnnnnnnnnnnnnnnnnnnnnnnnnnnnnnnnnnnnnnnnnnnnnnnnnnnnnnnnnnnnnnnnnnnnnnnnnnnnnnnnnnnnnnnnnnnnnnnnnnnnnnnnnnnnnnnnnnnnnnnnnnnnnnnnnnnnnnnnnnnnnnnnnnnnnnnnnnnnnnnnnnnnnnnnnnnnnnnnnnnnnnnnnnnnnnnnnnnnnnnnnnnnnnnnnnnnnnnnnnnnnnnnnnnnnnnnnnnnnnnnnnnnnnnnnnnnnnnnnnnnnnnnnnnnnnnnnnnnnnnnnnnnnnnnnnnnnnnnnnnnnnnnnnnnnnnnnnnnnnnnnnnnnnnnnnnnnnnnnnnnnnnnnnnnnnnnnnnnnnnnnnnnnnnnnnnnnnnnnnnnnnnnnnnnnnnnnnnnnnnnnnnnnnnnnnnnnnnnnnnnnnnnnnnnnnnnnnnnnnnnnnnnnnnnnnnnnnnnnnnnnnnnnnnnnnnnnnnnnnnnnnnnnnnnnnnnnnnnnnnnnnnnnnnnnnnnnnnnnnnnnnnnnnnnnnnnnnnnnnnnnnnnnnnnnnnnnnnnnnnnnnnnnnnnnnnnnnnnnnnnnnnnnnnnnnnnnnnnnnnnnnnnnnnnnnnnnnnnnnnnnnnnnnnnnnnnnnnnnnnnnnnnnnnnnnnnnnnnnnnnnnnnnnnnnnnnnnnnnnnnnnnnnnnnnnnnnnnnnnnnnnnnnnnnnnnnnnnnnnnnnnnnnnnnnnnnnnnnnnnnnnnnnnnnnnnnnnnnnnnnnnnnnnnnnnnnnnnnnnnnnnnnnnnnnnnnnnnnnnnnnnnnnnnnnnnnnnnnnnnnnnnnnnnnnnnnnnnnnnnnnnnnnnnnnnnnnnnnnnnnnnnnnnnnnnnnnnnnnnnnnnnnnnnnnnnnnnnnnnnnnnnnnnnnnnnnnnnnnnnnnnnnnnnnnnnnnnnnnnnnnnnnnnnnnnnnnnnnnnnnnnnnnnnnnnnnnnnnnnnnnnnnnnnnnnnnnnnnnnnnnnnnnnnnnnnnnnnnnnnnnnnnnnnnnnnnnnnnnnnnnnnnnnnnnnnnnnnnnnnnnnnnnnnnnnnnnnnnnnnnnnnnnnnnnnnnnnnnnnnnnnnnnnnnnnnnnnnnnnnnnnnnnnnnnnnnnnnnnnnnnnnnnnnnnnnnnnnnnnnnnnnnnnnnnnnnnnnnnnnnnnnnnnnnnnnnnnnnnnnnnnnnnnnnnnnnnnnnnnnnnnnnnnnnnnnnnnnnnnnnnnnnnnnnnnnnnnnnnnnnnnnnnnnnnnnnnnnnnnnnnnnnnnnnnnnnnnnnnnnnnnnnnnnnnnnnnnnnnnnnnnnnnnnnnnnnnnnnnnnnnnnnnnnnnnnnnnnnnnnnnnnnnnnnnnnnnnnnnnnnnnnnnnnnnnnnnnnnnnnnnnnnnnnnnnnnnnnnnnnnnnnnnnnnnnnnnnnnnnnnnnnnnnnnnnnnnnnnnnnnnnnnnnnnnnnnnnnnnnnnnnnnnnnnnnnnnnnnnnnnnnnnnnnnnnnnnnnnnnnnnnnnnnnnnnnnnnnnnnnnnnnnnnnnnnnnnnnnnnnnnnnnnnnnnnnnnnnnnnnnnnnnnnnnnnnnnnnnnnnnnnnnnnnnnnnnnnnnnnnnnnnnnnnnnnnnnnnnnnnnnnnnnnnnnnnnnnnnnnnnnnnnnnnnnnnnnnnnnnnnnnnnnnnnnnnnnnnnnnnnnnnnnnnnnnnnnnnnnnnnnnnnnnnnnnnnnnnnnnnnnnnnnnnnnnnnnnnnnnnnnnnnnnnnnnnnnnnnnnnnnnnnnnnnnnnnnnnnnnnnnnnnnnnnnnnnnnnnnnnnnnnnnnnnnnnnnnnnnnnnnnnnnnnnnnnnnnnnnnnnnnnnnnnnnnnnnnnnnnnnnnnnnnnnnnnnnnnnnnnnnnnnnnnnnnnnnnnnnnnnnnnnnnnnnnnnnnnnnnnnnnnnnnnnnnnnnnnnnnnnnnnnnnnnnnnnnnnnnnnnnnnnnnnnnnnnnnnnnnnnnnnnnnnnnnnnnnnnnnnnnnnnnnnnnnnnnnnnnnnnnnnnnnnnnnnnnnnnnnnnnnnnnnnnnnnnnnnnnnnnnnnnnnnnnnnnnnnnnnnnnnnnnnnnnnnnnnnnnnnnnnnnnnnnnnnnnnnnnnnnnnnnnnnnnnnnnnnnnnnnnnnnnnnnnnnnnnnnnnnnnnnnnnnnnnnnnnnnnnnnnnnnnnnnnnnnnnnnnnnnnnnnnnnnnnnnnnnnnnnnnnnnnnnnnnnnnnnnnnnnnnnnnnnnnnnnnnnnnnnnnnnnnnnnnnnnnnnnnnnnnnnnnnnnnnnnnnnnnnnnnnnnnnnnnnnnnnnnnnnnnnnnnnnnnnnnnnnnnnnnnnnnnnnnnnnnnnnnnnnnnnnnnnnnnnnnnnnnnnnnnnnnnnnnnnnnnnnnnnnnnnnnnnnnnnnnnnnnnnnnnnnnnnnnnnnnnnnnnnnnnnnnnnnnnnnnnnnnnnnnnnnnnnnnnnnnnnnnnnnnnnnnnnnnnnnnnnnnnnnnnnnnnnnnnnnnnnnnnnnnnnnnnnnnnnnnnnnnnnnnnnnnnnnnnnnnnnnnnnnnnnnnnnnnnnnnnnnnnnnnnnnnnnnnnnnnnnnnnnnnnnnnnnnnnnnnnnnnnnnnnnnnnnnnnnnnnnnnnnnnnnnnnnnnnnnnnnnnnnnnnnnnnnnnnnnnnnnnnnnnnnnnnnnnnnnnnnnnnnnnnnnnnnnnnnnnnnnnnnnnnnnnnnnnnnnnnnnnnnnnnnnnnnnnnnnnnnnnnnnnnnnnnnnnnnnnnnnnnnnnnnnnnnnnnnnnnnnnnnnnnnnnnnnnnnnnnnnnnnnnnnnnnnnnnnnnnnnnnnnnnnnnnnnnnnnnnnnnnnnnnnnnnnnnnnnnnnnnnnnnnnnnnnnnnnnnnnnnnnnnnnnnnnnnnnnnnnnnnnnnnnnnnnnnnnnnnnnnnnnnnnnnnnnnnnnnnnnnnnnnnnnnnnnnnnnnnnnnnnnnnnnnnnnnnnnnnnnnnnnnnnnnnnnnnnnnnnnnnnnnnnnnnnnnnnnnnnnnnnnnnnnnnnnnnnnnnnnnnnnnnnnnnnnnnnnnnnnnnnnnnnnnnnnnnnnnnnnnnnnnnnnnnnnnnnnnnnnnnnnnnnnnnnnnnnnnnnnnnnnnnnnnnnnnnnnnnnnnnnnnnnnnnnnnnnnnnnnnnnnnnnnnnnnnnnnnnnnnnnnnnnnnnnnnnnnnnnnnnnnnnnnnnnnnnnnnnnnnnnnnnnnnnnnnnnnnnnnnnnnnnnnnnnnnnnnnnnnnnnnnnnnnnnnnnnnnnnnnnnnnnnnnnnnnnnnnnnnnnnnnnnnnnnnnnnnnnnnnnnnnnnnnnnnnnnnnnnnnnnnnnnnnnnnnnnnnnnnnnnnnnnnnnnnnnnnnnnnnnnnnnnnnnnnnnnnnnnnnnnnnnnnnnnnnnnnnnnnnnnnnnnnnnnnnnnnnnnnnnnnnnnnnnnnnnnnnnnnnnnnnnnnnnnnnnnnnnnnnnnnnnnnnnnnnnnnnnnnnnnnnnnnnnnnnnnnnnnnnnnnnnnnnnnnnnnnnnnnnnnnnnnnnnnnnnnnnnnnnnnnnnnnnnnnnnnnnnnnnnnnnnnnnnnnnnnnnnnnnnnnnnnnnnnnnnnnnnnnnnnnnnnnnnnnnnnnnnnnnnnnnnnnnnnnnnnnnnnnnnnnnnnnnnnnnnnnnnnnnnnnnnnnnnnnnnnnnnnnnnnnnnnnnnnnnnnnnnnnnnnnnnnnnnnnnnnnnnnnnnnnnnnnnnnnnnnnnnnnnnnnnnnnnnnnnnnnnnnnnnnnnnnnnnnnnnnnnnnnnnnnnnnnnnnnnnnnnnnnnnnnnnnnnnnnnnnnnnnnnnnnnnnnnnnnnnnnnnnnnnnnnnnnnnnnnnnnnnnnnnnnnnnnnnnnnnnnnnnnnnnnnnnnnnnnnnnnnnnnnnnnnnnnnnnnnnnnnnnnnnnnnnnnnnnnnnnnnnnnnnnnnnnnnnnnnnnnnnnnnnnnnnnnnnnnnnnnnnnnnnnnnnnnnnnnnnnnnnnnnnnnnnnnnnnnnnnnnnnnnnnnnnnnnnnnnnnnnnnnnnnnnnnnnnnnnnnnnnnnnnnnnnnnnnnnnnnnnnnnnnnnnnnnnnnnnnnnnnnnnnnnnnnnnnnnnnnnnnnnnnnnnnnnnnnnnnnnnnnnnnnnnnnnnnnnnnnnnnnnnnnnnnnnnnnnnnnnnnnnnnnnnnnnnnnnnnnnnnnnnnnnnnnnnnnnnnnnnnnnnnnnnnnnnnnnnnnnnnnnnnnnnnnnnnnnnnnnnnnnnnnnnnnnnnnnnnnnnnnnnnnnnnnnnnnnnnnnnnnnnnnnnnnnnnnnnnnnnnnnnnnnnnnnnnnnnnnnnnnnnnnnnnnnnnnnnnnnnnnnnnnnnnnnnnnnnnnnnnnnnnnnnnnnnnnnnnnnnnnnnnnnnnnnnnnnnnnnnnnnnnnnnnnnnnnnnnnnnnnnnnnnnnnnnnnnnnnnnnnnnnnnnnnnnnnnnnnnnnnnnnnnnnnnnnnnnnnnnnnnnnnnnnnnnnnnnnnnnnnnnnnnnnnnnnnnnnnnnnnnnnnnnnnnnnnnnnnnnnnnnnnnnnnnnnnnnnnnnnnnnnnnnnnnnnnnnnnnnnnnnnnnnnnnnnnnnnnnnnnnnnnnnnnnnnnnnnnnnnnnnnnnnnnnnnnnnnnnnnnnnnnnnnnnnnnnnnnnnnnnnnnnnnnnnnnnnnnnnnnnnnnnnnnnnnnnnnnnnnnnnnnnnnnnnnnnnnnnnnnnnnnnnnnnnnnnnnnnnnnnnnnnnnnnnnnnnnnnnnnnnnnnnnnnnnnnnnnnnnnnnnnnnnnnnnnnnnnnnnnnnnnnnnnnnnnnnnnnnnnnnnnnnnnnnnnnnnnnnnnnnnnnnnnnnnnnnnnnnnnnnnnnnnnnnnnnnnnnnnnnnnnnnnnnnnnnnnnnnnnnnnnnnnnnnnnnnnnnnnnnnnnnnnnnnnnnnnnnnnnnnnnnnnnnnnnnnnnnnnnnnnnnnnnnnnnnnnnnnnnnnnnnnnnnnnnnnnnnnnnnnnnnnnnnnnnnnnnnnnnnnnnnnnnnnnnnnnnnnnnnnnnnnnnnnnnnnnnnnnnnnnnnnnnnnnnnnnnnnnnnnnnnnnnnnnnnnnnnnnnnnnnnnnnnnnnnnnnnnnnnnnnnnnnnnnnnnnnnnnnnnnnnnnnnnnnnnnnnnnnnnnnnnnnnnnnnnnnnnnnnnnnnnnnnnnnnnnnnnnnnnnnnnnnnnnnnnnnnnnnnnnnnnnnnnnnnnnnnnnnnnnnnnnnnnnnnnnnnnnnnnnnnnnnnnnnnnnnnnnnnnnnnnnnnnnnnnnnnnnnnnnnnnnnnnnnnnnnnnnnnnnnnnnnnnnnnnnnnnnnnnnnnnnnnnnnnnnnnnnnnnnnnnnnnnnnnnnnnnnnnnnnnnnnnnnnnnnnnnnnnnnnnnnnnnnnnnnnnnnnnnnnnnnnnnnnnnnnnnnnnnnnnnnnnnnnnnnnnnnnnnnnnnnnnnnnnnnnnnnnnnnnnnnnnnnnnnnnnnnnnnnnnnnnnnnnnnnnnnnnnnnnnnnnnnnnnnnnnnnnnnnnnnnnnnnnnnnnnnnnnnnnnnnnnnnnnnnnnnnnnnnnnnnnnnnnnnnnnnnnnnnnnnnnnnnnnnnnnnnnnnnnnnnnnnnnnnnnnnnnnnnnnnnnnnnnnnnnnnnnnnnnnnnnnnnnnnnnnnnnnnnnnnnnnnnnnnnnnnnnnnnnnnnnnnnnnnnnnnnnnnnnnnnnnnnnnnnnnnnnnnnnnnnnnnnnnnnnnnnnnnnnnnnnnnnnnnnnnnnnnnnnnnnnnnnnnnnnnnnnnnnnnnnnnnnnnnnnnnnnnnnnnnnnnnnnnnnnnnnnnnnnnnnnnnnnnnnnnnnnnnnnnnnnnnnnnnnnnnnnnnnnnnnnnnnnnnnnnnnnnnnnnnnnnnnnnnnnnnnnnnnnnnnnnnnnnnnnnnnnnnnnnnnnnnnnnnnnnnnnnnnnnnnnnnnnnnnnnnnnnnnnnnnnnnnnnnnnnnnnnnnnnnnnnnnnnnnnnnnnnnnnnnnnnnnnnnnnnnnnnnnnnnnnnnnnnnnnnnnnnnnnnnnnnnnnnnnnnnnnnnnnnnnnnnnnnnnnnnnnnnnnnnnnnnnnnnnnnnnnnnnnnnnnnnnnnnnnnnnnnnnnnnnnnnnnnnnnnnnnnnnnnnnnnnnnnnnnnnnnnnnnnnnnnnnnnnnnnnnnnnnnnnnnnnnnnnnnnnnnnnnnnnnnnnnnnnnnnnnnnnnnnnnnnnnnnnnnnnnnnnnnnnnnnnnnnnnnnnnnnnnnnnnnnnnnnnnnnnnnnnnnnnnnnnnnnnnnnnnnnnnnnnnnnnnnnnnnnnnnnnnnnnnnnnnnnnnnnnnnnnnnnnnnnnnnnnnnnnnnnnnnnnnnnnnnnnnnnnnnnnnnnnnnnnnnnnnnnnnnnnnnnnnnnnnnnnnnnnnnnnnnnnnnnnnnnnnnnnnnnnnnnnnnnnnnnnnnnnnnnnnnnnnnnnnnnnnnnnnnnnnnnnnnnnnnnnnnnnnnnnnnnnnnnnnnnnnnnnnnnnnnnnnnnnnnnnnnnnnnnnnnnnnnnnnnnnnnnnnnnnnnnnnnnnnnnnnnnnnnnnnnnnnnnnnnnnnnnnnnnnnnnnnnnnnnnnnnnnnnnnnnnnnnnnnnnnnnnnnnnnnnnnnnnnnnnnnnnnnnnnnnnnnnnnnnnnnnnnnnnnnnnnnnnnnnnnnnnnnnnnnnnnnnnnnnnnnnnnnnnnnnnnnnnnnnnnnnnnnnnnnnnnnnnnnnnnnnnnnnnnnnnnnnnnnnnnnnnnnnnnnnnnnnnnnnnnnnnnnnnnnnnnnnnnnnnnnnnnnnnnnnnnnnnnnnnnnnnnnnnnnnnnnnnnnnnnnnnnnnnnnnnnnnnnnnnnnnnnnnnnnnnnnnnnnnnnnnnnnnnnnnnnnnnnnnnnnnnnnnnnnnnnnnnnnnnnnnnnnnnnnnnnnnnnnnnnnnnnnnnnnnnnnnnnnnnnnnnnnnnnnnnnnnnnnnnnnnnnnnnnnnnnnnnnnnnnnnnnnnnnnnnnnnnnnnnnnnnnnnnnnnnnnnnnnnnnnnnnnnnnnnnnnnnnnnnnnnnnnnnnnnnnnnnnnnnnnnnnnnnnnnnnnnnnnnnnnnnnnnnnnnnnnnnnnnnnnnnnnnnnnnnnnnnnnnnnnnnnnnnnnnnnnnnnnnnnnnnnnnnnnnnnnnnnnnnnnnnnnnnnnnnnnnnnnnnnnnnnnnnnnnnnnnnnnnnnnnnnnnnnnnnnnnnnnnnnnnnnnnnnnnnnnnnnnnnnnnnnnnnnnnnnnnnnnnnnnnnnnnnnnnnnnnnnnnnnnnnnnnnnnnnnnnnnnnnnnnnnnnnnnnnnnnnnnnnnnnnnnnnnnnnnnnnnnnnnnnnnnnnnnnnnnnnnnnnnnnnnnnnnnnnnnnnnnnnnnnnnnnnnnnnnnnnnnnnnnnnnnnnnnnnnnnnnnnnnnnnnnnnnnnnnnnnnnnnnnnnnnnnnnnnnnnnnnnnnnnnnnnnnnnnnnnnnnnnnnnnnnnnnnnnnnnnnnnnnnnnnnnnnnnnnnnnnnnnnnnnnnnnnnnnnnnnnnnnnnnnnnnnnnnnnnnnnnnnnnnnnnnnnnnnnnnnnnnnnnnnnnnnnnnnnnnnnnnnnnnnnnnnnnnnnnnnnnnnnnnnnnnnnnnnnnnnnnnnnnnnnnnnnnnnnnnnnnnnnnnnnnnnnnnnnnnnnnnnnnnnnnnnnnnnnnnnnnnnnnnnnnnnnnnnnnnnnnnnnnnnnnnnnnnnnnnnnnnnnnnnnnnnnnnnnnnnnnnnnnnnnnnnnnnnnnnnnnnnnnnnnnnnnnnnnnnnnnnnnnnnnnnnnnnnnnnnnnnnnnnnnnnnnnnnnnnnnnnnnnnnnnnnnnnnnnnnnnnnnnnnnnnnnnnnnnnnnnnnnnnnnnnnnnnnnnnnnnnnnnnnnnnnnnnnnnnnnnnnnnnnnnnnnnnnnnnnnnnnnnnnnnnnnnnnnnnnnnnnnnnnnnnnnnnnnnnnnnnnnnnnnnnnnnnnnnnnnnnnnnnnnnnnnnnnnnnnnnnnnnnnnnnnnnnnnnnnnnnnnnnnnnnnnnnnnnnnnnnnnnnnnnnnnnnnnnnnnnnnnnnnnnnnnnnnnnnnnnnnnnnnnnnnnnnnnnnnnnnnnnnnnnnnnnnnnnnnnnnnnnnnnnnnnnnnnnnnnnnnnnnnnnnnnnnnnnnnnnnnnnnnnnnnnnnnnnnnnnnnnnnnnnnnnnnnnnnnnnnnnnnnnnnnnnnnnnnnnnnnnnnnnnnnnnnnnnnnnnnnnnnnnnnnnnnnnnnnnnnnnnnnnnnnnnnnnnnnnnnnnnnnnnnnnnnnnnnnnnnnnnnnnnnnnnnnnnnnnnnnnnnnnnnnnnnnnnnnnnnnnnnnnnnnnnnnnnnnnnnnnnnnnnnnnnnnnnnnnnnnnnnnnnnnnnnnnnnnnnnnnnnnnnnnnnnnnnnnnnnnnnnnnnnnnnnnnnnnnnnnnnnnnnnnnnnnnnnnnnnnnnnnnnnnnnnnnnnnnnnnnnnnnnnnnnnnnnnnnnnnnnnnnnnnnnnnnnnnnnnnnnnnnnnnnnnnnnnnnnnnnnnnnnnnnnnnnnnnnnnnnnnnnnnnnnnnnnnnnnnnnnnnnnnnnnnnnnnnnnnnnnnnnnnnnnnnnnnnnnnnnnnnnnnnnnnnnnnnnnnnnnnnnnnnnnnnnnnnnnnnnnnnnnnnnnnnnnnnnnnnnnnnnnnnnnnnnnnnnnnnnnnnnnnnnnnnnnnnnnnnnnnnnnnnnnnnnnnnnnnnnnnnnnnnnnnnnnnnnnnnnnnnnnnnnnnnnnnnnnnnnnnnnnnnnnnnnnnnnnnnnnnnnnnnnnnnnnnnnnnnnnnnnnnnnnnnnnnnnnnnnnnnnnnnnnnnnnnnnnnnnnnnnnnnnnnnnnnnnnnnnnnnnnnnnnnnnnnnnnnnnnnnnnnnnnnnnnnnnnnnnnnnnnnnnnnnnnnnnnnnnnnnnnnnnnnnnnnnnnnnnnnnnnnnnnnnnnnnnnnnnnnnnnnnnnnnnnnnnnnnnnnnnnnnnnnnnnnnnnnnnnnnnnnnnnnnnnnnnnnnnnnnnnnnnnnnnnnnnnnnnnnnnnnnnnnnnnnnnnnnnnnnnnnnnnnnnnnnnnnnnnnnnnnnnnnnnnnnnnnnnnnnnnnnnnnnnnnnnnnnnnnnnnnnnnnnnnnnnnnnnnnnnnnnnnnnnnnnnnnnnnnnnnnnnnnnnnnnnnnnnnnnnnnnnnnnnnnnnnnnnnnnnnnnnnnnnnnnnnnnnnnnnnnnnnnnnnnnnnnnnnnnnnnnnnnnnnnnnnnnnnnnnnnnnnnnnnnnnnnnnnnnnnnnnnnnnnnnnnnnnnnnnnnnnnnnnnnnnnnnnnnnnnnnnnnnnnnnnnnnnnnnnnnnnnnnnnnnnnnnnnnnnnnnnnnnnnnnnnnnnnnnnnnnnnnnnnnnnnnnnnnnnnnnnnnnnnnnnnnnnnnnnnnnnnnnnnnnnnnnnnnnnnnnnnnnnnnnnnnnnnnnnnnnnnnnnnnnnnnnnnnnnnnnnnnnnnnnnnnnnnnnnnnnnnnnnnnnnnnnnnnnnnnnnnnnnnnnnnnnnnnnnnnnnnnnnnnnnnnnnnnnnnnnnnnnnnnnnnnnnnnnnnnnnnnnnnnnnnnnnnnnnnnnnnnnnnnnnnnnnnnnnnnnnnnnnnnnnnnnnnnnnnnnnnnnnnnnnnnnnnnnnnnnnnnnnnnnnnnnnnnnnnnnnnnnnnnnnnnnnnnnnnnnnnnnnnnnnnnnnnnnnnnnnnnnnnnnnnnnnnnnnnnnnnnnnnnnnnnnnnnnnnnnnnnnnnnnnnnnnnnnnnnnnnnnnnnnnnnnnnnnnnnnnnnnnnnnnnnnnnnnnnnnnnnnnnnnnnnnnnnnnnnnnnnnnnnnnnnnnnnnnnnnnnnnnnnnnnnnnnnnnnnnnnnnnnnnnnnnnnnnnnnnnnnnnnnnnnnnnnnnnnnnnnnnnnnnnnnnnnnnnnnnnnnnnnnnnnnnnnnnnnnnnnnnnnnnnnnnnnnnnnnnnnnnnnnnnnnnnnnnnnnnnnnnnnnnnnnnnnnnnnnnnnnnnnnnnnnnnnnnnnnnnnnnnnnnnnnnnnnnnnnnnnnnnnnnnnnnnnnnnnnnnnnnnnnnnnnnnnnnnnnnnnnnnnnnnnnnnnnnnnnnnnnnnnnnnnnnnnnnnnnnnnnnnnnnnnnnnnnnnnnnnnnnnnnnnnnnnnnnnnnnnnnnnnnnnnnnnnnnnnnnnnnnnnnnnnnnnnnnnnnnnnnnnnnnnnnnnnnnnnnnnnnnnnnnnnnnnnnnnnnnnnnnnnnnnnnnnnnnnnnnnnnnnnnnnnnnnnnnnnnnnnnnnnnnnnnnnnnnnnnnnnnnnnnnnnnnnnnnnnnnnnnnnnnnnnnnnnnnnnnnnnnnnnnnnnnnnnnnnnnnnnnnnnnnnnnnnnnnnnnnnnnnnnnnnnnnnnnnnnnnnnnnnnnnnnnnnnnnnnnnnnnnnnnnnnnnnnnnnnnnnnnnnnnnnnnnnnnnnnnnnnnnnnnnnnnnnnnnnnnnnnnnnnnnnnnnnnnnnnnnnnnnnnnnnnnnnnnnnnnnnnnnnnnnnnnnnnnnnnnnnnnnnnnnnnnnnnnnnnnnnnnnnnnnnnnnnnnnnnnnnnnnnnnnnnnnnnnnnnnnnnnnnnnnnnnnnnnnnnnnnnnnnnnnnnnnnnnnnnnnnnnnnnnnnnnnnnnnnnnnnnnnnnnnnnnnnnnnnnnnnnnnnnnnnnnnnnnnnnnnnnnnnnnnnnnnnnnnnnnnnnnnnnnnnnnnnnnnnnnnnnnnnnnnnnnnnnnnnnnnnnnnnnnnnnnnnnnnnnnnnnnnnnnnnnnnnnnnnnnnnnnnnnnnnnnnnnnnnnnnnnnnnnnnnnnnnnnnnnnnnnnnnnnnnnnnnnnnnnnnnnnnnnnnnnnnnnnnnnnnnnnnnnnnnnnnnnnnnnnnnnnnnnnnnnnnnnnnnnnnnnnnnnnnnnnnnnnnnnnnnnnnnnnnnnnnnnnnnnnnnnnnnnnnnnnnnnnnnnnnnnnnnnnnnnnnnnnnnnnnnnnnnnnnnnnnnnnnnnnnnnnnnnnnnnnnnnnnnnnnnnnnnnnnnnnnnnnnnnnnnnnnnnnnnnnnnnnnnnnnnnnnnnnnnnnnnnnnnnnnnnnnnnnnnnnnnnnnnnnnnnnnnnnnnnnnnnnnnnnnnnnnnnnnnnnnnnnnnnnnnnnnnnnnnnnnnnnnnnnnnnnnnnnnnnnnnnnnnnnnnnnnnnnnnnnnnnnnnnnnnnnnnnnnnnnnnnnnnnnnnnnnnnnnnnnnnnnnnnnnnnnnnnnnnnnnnnnnnnnnnnnnnnnnnnnnnnnnnnnnnnnnnnnnnnnnnnnnnnnnnnnnnnnnnnnnnnnnnnnnnnnnnnnnnnnnnnnnnnnnnnnnnnnnnnnnnnnnnnnnnnnnnnnnnnnnnnnnnnnnnnnnnnnnnnnnnnnnnnnnnnnnnnnnnnnnnnnnnnnnnnnnnnnnnnnnnnnnnnnnnnnnnnnnnnnnnnnnnnnnnnnnnnnnnnnnnnnnnnnnnnnnnnnnnnnnnnnnnnnnnnnnnnnnnnnnnnnnnnnnnnnnnnnnnnnnnnnnnnnnnnnnnnnnnnnnnnnnnnnnnnnnnnnnnnnnnnnnnnnnnnnnnnnnnnnnnnnnnnnnnnnnnnnnnnnnnnnnnnnnnnnnnnnnnnnnnnnnnnnnnnnnnnnnnnnnnnnnnnnnnnnnnnnnnnnnnnnnnnnnnnnnnnnnnnnnnnnnnnnnnnnnnnnnnnnnnnnnnnnnnnnnnnnnnnnnnnnnnnnnnnnnnnnnnnnnnnnnnnnnnnnnnnnnnnnnnnnnnnnnnnnnnnnnnnnnnnnnnnnnnnnnnnnnnnnnnnnnnnnnnnnnnnnnnnnnnnnnnnnnnnnnnnnnnnnnnnnnnnnnnnnnnnnnnnnnnnnnnnnnnnnnnnnnnnnnnnnnnnnnnnnnnnnnnnnnnnnnnnnnnnnnnnnnnnnnnnnnnnnnnnnnnnnnnnnnnnnnnnnnnnnnnnnnnnnnnnnnnnnnnnnnnnnnnnnnnnnnnnnnnnnnnnnnnnnnnnnnnnnnnnnnnnnnnnnnnnnnnnnnnnnnnnnnnnnnnnnnnnnnnnnnnnnnnnnnnnnnnnnnnnnnnnnnnnnnnnnnnnnnnnnnnnnnnnnnnnnnnnnnnnnnnnnnnnnnnnnnnnnnnnnnnnnnnnnnnnnnnnnnnnnnnnnnnnnnnnnnnnnnnnnnnnnnnnnnnnnnnnnnnnnnnnnnnnnnnnnnnnnnnnnnnnnnnnnnnnnnnnnnnnnnnnnnnnnnnnnnnnnnnnnnnnnnnnnnnnnnnnnnnnnnnnnnnnnnnnnnnnnnnnnnnnnnnnnnnnnnnnnnnnnnnnnnnnnnnnnnnnnnnnnnnnnnnnnnnnnnnnnnnnnnnnnnnnnnnnnnnnnnnnnnnnnnnnnnnnnnnnnnnnnnnnnnnnnnnnnnnnnnnnnnnnnnnnnnnnnnnnnnnnnnnnnnnnnnnnnnnnnnnnnnnnnnnnnnnnnnnnnnnnnnnnnnnnnnnnnnnnnnnnnnnnnnnnnnnnnnnnnnnnnnnnnnnnnnnnnnnnnnnnnnnnnnnnnnnnnnnnnnnnnnnnnnnnnnnnnnnnnnnnnnnnnnnnnnnnnnnnnnnnnnnnnnnnnnnnnnnnnnnnnnnnnnnnnnnnnnnnnnnnnnnnnnnnnnnnnnnnnnnnnnnnnnnnnnnnnnnnnnnnnnnnnnnnnnnnnnnnnnnnnnnnnnnnnnnnnnnnnnnnnnnnnnnnnnnnnnnnnnnnnnnnnnnnnnnnnnnnnnnnnnnnnnnnnnnnnnnnnnnnnnnnnnnnnnnnnnnnnnnnnnnnnnnnnnnnnnnnnnnnnnnnnnnnnnnnnnnnnnnnnnnnnnnnnnnnnnnnnnnnnnnnnnnnnnnnnnnnnnnnnnnnnnnnnnnnnnnnnnnnnnnnnnnnnnnnnnnnnnnnnnnnnnnnnnnnnnnnnnnnnnnnnnnnnnnnnnnnnnnnnnnnnnnnnnnnnnnnnnnnnnnnnnnnnnnnnnnnnnnnnnnnnnnnnnnnnnnnnnnnnnnnnnnnnnnnnnnnnnnnnnnnnnnnnnnnnnnnnnnnnnnnnnnnnnnnnnnnnnnnnnnnnnnnnnnnnnnnnnnnnnnnnnnnnnnnnnnnnnnnnnnnnnnnnnnnnnnnnnnnnnnnnnnnnnnnnnnnnnnnnnnnnnnnnnnnnnnnnnnnnnnnnnnnnnnnnnnnnnnnnnnnnnnnnnnnnnnnnnnnnnnnnnnnnnnnnnnnnnnnnnnnnnnnnnnnnnnnnnnnnnnnnnnnnnnnnnnnnnnnnnnnnnnnnnnnnnnnnnnnnnnnnnnnnnnnnnnnnnnnnnnnnnnnnnnnnnnnnnnnnnnnnnnnnnnnnnnnnnnnnnnnnnnnnnnnnnnnnnnnnnnnnnnnnnnnnnnnnnnnnnnnnnnnnnnnnnnnnnnnnnnnnnnnnnnnnnnnnnnnnnnnnnnnnnnnnnnnnnnnnnnnnnnnnnnnnnnnnnnnnnnnnnnnnnnnnnnnnnnnnnnnnnnnnnnnnnnnnnnnnnnnnnnnnnnnnnnnnnnnnnnnnnnnnnnnnnnnnnnnnnnnnnnnnnnnnnnnnnnnnnnnnnnnnnnnnnnnnnnnnnnnnnnnnnnnnnnnnnnnnnnnnnnnnnnnnnnnnnnnnnnnnnnnnnnnnnnnnnnnnnnnnnnnnnnnnnnnnnnnnnnnnnnnnnnnnnnnnnnnnnnnnnnnnnnnnnnnnnnnnnnnnnnnnnnnnnnnnnnnnnnnnnnnnnnnnnnnnnnnnnnnnnnnnnnnnnnnnnnnnnnnnnnnnnnnnnnnnnnnnnnnnnnnnnnnnnnnnnnnnnnnnnnnnnnnnnnnnnnnnnnnnnnnnnnnnnnnnnnnnnnnnnnnnnnnnnnnnnnnnnnnnnnnnnnnnnnnnnnnnnnnnnnnnnnnnnnnnnnnnnnnnnnnnnnnnnnnnnnnnnnnnnnnnnnnnnnnnnnnnnnnnnnnnnnnnnnnnnnnnnnnnnnnnnnnnnnnnnnnnnnnnnnnnnnnnnnnnnnnnnnnnnnnnnnnnnnnnnnnnnnnnnnnnnnnnnnnnnnnnnnnnnnnnnnnnnnnnnnnnnnnnnnnnnnnnnnnnnnnnnnnnnnnnnnnnnnnnnnnnnnnnnnnnnnnnnnnnnnnnnnnnnnnnnnnnnnnnnnnnnnnnnnnnnnnnnnnnnnnnnnnnnnnnnnnnnnnnnnnnnnnnnnnnnnnnnnnnnnnnnnnnnnnnnnnnnnnnnnnnnnnnnnnnnnnnnnnnnnnnnnnnnnnnnnnnnnnnnnnnnnnnnnnnnnnnnnnnnnnnnnnnnnnnnnnnnnnnnnnnnnnnnnnnnnnnnnnnnnnnnnnnnnnnnnnnnnnnnnnnnnnnnnnnnnnnnnnnnnnnnnnnnnnnnnnnnnnnnnnnnnnnnnnnnnnnnnnnnnnnnnnnnnnnnnnnnnnnnnnnnnnnnnnnnnnnnnnnnnnnnnnnnnnnnnnnnnnnnnnnnnnnnnnnnnnnnnnnnnnnnnnnnnnnnnnnnnnnnnnnnnnnnnnnnnnnnnnnnnnnnnnnnnnnnnnnnnnnnnnnnnnnnnnnnnnnnnnnnnnnnnnnnnnnnnnnnnnnnnnnnnnnnnnnnnnnnnnnnnnnnnnnnnnnnnnnnnnnnnnnnnnnnnnnnnnnnnnnnnnnnnnnnnnnnnnnnnnnnnnnnnnnnnnnnnnnnnnnnnnnnnnnnnnnnnnnnnnnnnnnnnnnnnnnnnnnnnnnnnnnnnnnnnnnnnnnnnnnnnnnnnnnnnnnnnnnnnnnnnnnnnnnnnnnnnnnnnnnnnnnnnnnnnnnnnnnnnnnnnnnnnnnnnnnnnnnnnnnnnnnnnnnnnnnnnnnnnnnnnnnnnnnnnnnnnnnnnnnnnnnnnnnnnnnnnnnnnnnnnnnnnnnnnnnnnnnnnnnnnnnnnnnnnnnnnnnnnnnnnnnnnnnnnnnnnnnnnnnnnnnnnnnnnnnnnnnnnnnnnnnnnnnnnnnnnnnnnnnnnnnnnnnnnnnnnnnnnnnnnnnnnnnnnnnnnnnnnnnnnnnnnnnnnnnnnnnnnnnnnnnnnnnnnnnnnnnnnnnnnnnnnnnnnnnnnnnnnnnnnnnnnnnnnnnnnnnnnnnnnnnnnnnnnnnnnnnnnnnnnnnnnnnnnnnnnnnnnnnnnnnnnnnnnnnnnnnnnnnnnnnnnnnnnnnnnnnnnnnnnnnnnnnnnnnnnnnnnnnnnnnnnnnnnnnnnnnnnnnnnnnnnnnnnnnnnnnnnnnnnnnnnnnnnnnnnnnnnnnnnnnnnnnnnnnnnnnnnnnnnnnnnnnnnnnnnnnnnnnnnnnnnnnnnnnnnnnnnnnnnnnnnnnnnnnnnnnnnnnnnnnnnnnnnnnnnnnnnnnnnnnnnnnnnnnnnnnnnnnnnnnnnnnnnnnnnnnnnnnnnnnnnnnnnnnnnnnnnnnnnnnnnnnnnnnnnnnnnnnnnnnnnnnnnnnnnnnnnnnnnnnnnnnnnnnnnnnnnnnnnnnnnnnnnnnnnnnnnnnnnnnnnnnnnnnnnnnnnnnnnnnnnnnnnnnnnnnnnnnnnnnnnnnnnnnnnnnnnnnnnnnnnnnnnnnnnnnnnnnnnnnnnnnnnnnnnnnnnnnnnnnnnnnnnnnnnnnnnnnnnnnnnnnnnnnnnnnnnnnnnnnnnnnnnnnnnnnnnnnnnnnnnnnnnnnnnnnnnnnnnnnnnnnnnnnnnnnnnnnnnnnnnnnnnnnnnnnnnnnnnnnnnnnnnnnnnnnnnnnnnnnnnnnnnnnnnnnnnnnnnnnnnnnnnnnnnnnnnnnnnnnnnnnnnnnnnnnnnnnnnnnnnnnnnnnnnnnnnnnnnnnnnnnnnnnnnnnnnnnnnnnnnnnnnnnnnnnnnnnnnnnnnnnnnnnnnnnnnnnnnnnnnnnnnnnnnnnnnnnnnnnnnnnnnnnnnnnnnnnnnnnnnnnnnnnnnnnnnnnnnnnnnnnnnnnnnnnnnnnnnnnnnnnnnnnnnnnnnnnnnnnnnnnnnnnnnnnnnnnnnnnnnnnnnnnnnnnnnnnnnnnnnnnnnnnnnnnnnnnnnnnnnnnnnnnnnnnnnnnnnnnnnnnnnnnnnnnnnnnnnnnnnnnnnnnnnnnnnnnnnnnnnnnnnnnnnnnnnnnnnnnnnnnnnnnnnnnnnnnnnnnnnnnnnnnnnnnnnnnnnnnnnnnnnnnnnnnnnnnnnnnnnnnnnnnnnnnnnnnnnnnnnnnnnnnnnnnnnnnnnnnnnnnnnnnnnnnnnnnnnnnnnnnnnnnnnnnnnnnnnnnnnnnnnnnnnnnnnnnnnnnnnnnnnnnnnnnnnnnnnnnnnnnnnnnnnnnnnnnnnnnnnnnnnnnnnnnnnnnnnnnnnnnnnnnnnnnnnnnnnnnnnnnnnnnnnnnnnnnnnnnnnnnnnnnnnnnnnnnnnnnnnnnnnnnnnnnnnnnnnnnnnnnnnnnnnnnnnnnnnnnnnnnnnnnnnnnnnnnnnnnnnnnnnnnnnnnnnnnnnnnnnnnnnnnnnnnnnnnnnnnnnnnnnnnnnnnnnnnnnnnnnnnnnnnnnnnnnnnnnnnnnnnnnnnnnnnnnnnnnnnnnnnnnnnnnnnnnnnnnnnnnnnnnnnnnnnnnnnnnnnnnnnnnnnnnnnnnnnnnnnnnnnnnnnnnnnnnnnnnnnnnnnnnnnnnnnnnnnnnnnnnnnnnnnnnnnnnnnnnnnnnnnnnnnnnnnnnnnnnnnnnnnnnnnnnnnnnnnnnnnnnnnnnnnnnnnnnnnnnnnnnnnnnnnnnnnnnnnnnnnnnnnnnnnnnnnnnnnnnnnnnnnnnnnnnnnnnnnnnnnnnnnnnnnnnnnnnnnnnnnnnnnnnnnnnnnnnnnnnnnnnnnnnnnnnnnnnnnnnnnnnnnnnnnnnnnnnnnnnnnnnnnnnnnnnnnnnnnnnnnnnnnnnnnnnnnnnnnnnnnnnnnnnnnnnnnnnnnnnnnnnnnnnnnnnnnnnnnnnnnnnnnnnnnnnnnnnnnnnnnnnnnnnnnnnnnnnnnnnnnnnnnnnnnnnnnnnnnnnnnnnnnnnnnnnnnnnnnnnnnnnnnnnnnnnnnnnnnnnnnnnnnnnnnnnnnnnnnnnnnnnnnnnnnnnnnnnnnnnnnnnnnnnnnnnnnnnnnnnnnnnnnnnnnnnnnnnnnnnnnnnnnnnnnnnnnnnnnnnnnnnnnnnnnnnnnnnnnnnnnnnnnnnnnnnnnnnnnnnnnnnnnnnnnnnnnnnnnnnnnnnnnnnnnnnnnnnnnnnnnnnnnnnnnnnnnnnnnnnnnnnnnnnnnnnnnnnnnnnnnnnnnnnnnnnnnnnnnnnnnnnnnnnnnnnnnnnnnnnnnnnnnnnnnnnnnnnnnnnnnnnnnnnnnnnnnnnnnnnnnnnnnnnnnnnnnnnnnnnnnnnnnnnnnnnnnnnnnnnnnnnnnnnnnnnnnnnnnnnnnnnnnnnnnnnnnnnnnnnnnnnnnnnnnnnnnnnnnnnnnnnnnnnnnnnnnnnnnnnnnnnnnnnnnnnnnnnnnnnnnnnnnnnnnnnnnnnnnnnnnnnnnnnnnnnnnnnnnnnnnnnnnnnnnnnnnnnnnnnnnnnnnnnnnnnnnnnnnnnnnnnnnnnnnnnnnnnnnnnnnnnnnnnnnnnnnnnnnnnnnnnnnnnnnnnnnnnnnnnnnnnnnnnnnnnnnnnnnnnnnnnnnnnnnnnnnnnnnnnnnnnnnnnnnnnnnnnnnnnnnnnnnnnnnnnnnnnnnnnnnnnnnnnnnnnnnnnnnnnnnnnnnnnnnnnnnnnnnnnnnnnnnnnnnnnnnnnnnnnnnnnnnnnnnnnnnnnnnnnnnnnnnnnnnnnnnnnnnnnnnnnnnnnnnnnnnnnnnnnnnnnnnnnnnnnnnnnnnnnnnnnnnnnnnnnnnnnnnnnnnnnnnnnnnnnnnnnnnnnnnnnnnnnnnnnnnnnnnnnnnnnnnnnnnnnnnnnnnnnnnnnnnnnnnnnnnnnnnnnnnnnnnnnnnnnnnnnnnnnnnnnnnnnnnnnnnnnnnnnnnnnnnnnnnnnnnnnnnnnnnnnnnnnnnnnnnnnnnnnnnnnnnnnnnnnnnnnnnnnnnnnnnnnnnnnnnnnnnnnnnnnnnnnnnnnnnnnnnnnnnnnnnnnnnnnnnnnnnnnnnnnnnnnnnnnnnnnnnnnnnnnnnnnnnnnnnnnnnnnnnnnnnnnnnnnnnnnnnnnnnnnnnnnnnnnnnnnnnnnnnnnnnnnnnnnnnnnnnnnnnnnnnnnnnnnnnnnnnnnnnnnnnnnnnnnnnnnnnnnnnnnnnnnnnnnnnnnnnnnnnnnnnnnnnnnnnnnnnnnnnnnnnnnnnnnnnnnnnnnnnnnnnnnnnnnnnnnnnnnnnnnnnnnnnnnnnnnnnnnnnnnnnnnnnnnnnnnnnnnnnnnnnnnnnnnnnnnnnnnnnnnnnnnnnnnnnnnnnnnnnnnnnnnnnnnnnnnnnnnnnnnnnnnnnnnnnnnnnnnnnnnnnnnnnnnnnnnnnnnnnnnnnnnnnnnnnnnnnnnnnnnnnnnnnnnnnnnnnnnnnnnnnnnnnnnnnnnnnnnnnnnnnnnnnnnnnnnnnnnnnnnnnnnnnnnnnnnnnnnnnnnnnnnnnnnnnnnnnnnnnnnnnnnnnnnnnnnnnnnnnnnnnnnnnnnnnnnnnnnnnnnnnnnnnnnnnnnnnnnnnnnnnnnnnnnnnnnnnnnnnnnnnnnnnnnnnnnnnnnnnnnnnnnnnnnnnnnnnnnnnnnnnnnnnnnnnnnnnnnnnnnnnnnnnnnnnnnnnnnnnnnnnnnnnnnnnnnnnnnnnnnnnnnnnnnnnnnnnnnnnnnnnnnnnnnnnnnnnnnnnnnnnnnnnnnnnnnnnnnnnnnnnnnnnnnnnnnnnnnnnnnnnnnnnnnnnnnnnnnnnnnnnnnnnnnnnnnnnnnnnnnnnnnnnnnnnnnnnnnnnnnnnnnnnnnnnnnnnnnnnnnnnnnnnnnnnnnnnnnnnnnnnnnnnnnnnnnnnnnnnnnnnnnnnnnnnnnnnnnnnnnnnnnnnnnnnnnnnnnnnnnnnnnnnnnnnnnnnnnnnnnnnnnnnnnnnnnnnnnnnnnnnnnnnnnnnnnnnnnnnnnnnnnnnnnnnnnnnnnnnnnnnnnnnnnnnnnnnnnnnnnnnnnnnnnnnnnnnnnnnnnnnnnnnnnnnnnnnnnnnnnnnnnnnnnnnnnnnnnnnnnnnnnnnnnnnnnnnnnnnnnnnnnnnnnnnnnnnnnnnnnnnnnnnnnnnnnnnnnnnnnnnnnnnnnnnnnnnnnnnnnnnnnnnnnnnnnnnnnnnnnnnnnnnnnnnnnnnnnnnnnnnnnnnnnnnnnnnnnnnnnnnnnnnnnnnnnnnnnnnnnnnnnnnnnnnnnnnnnnnnnnnnnnnnnnnnnnnnnnnnnnnnnnnnnnnnnnnnnnnnnnnnnnnnnnnnnnnnnnnnnnnnnnnnnnnnnnnnnnnnnnnnnnnnnnnnnnnnnnnnnnnnnnnnnnnnnnnnnnnnnnnnnnnnnnnnnnnnnnnnnnnnnnnnnnnnnnnnnnnnnnnnnnnnnnnnnnnnnnnnnnnnnnnnnnnnnnnnnnnnnnnnnnnnnnnnnnnnnnnnnnnnnnnnnnnnnnnnnnnnnnnnnnnnnnnnnnnnnnnnnnnnnnnnnnnnnnnnnnnnnnnnnnnnnnnnnnnnnnnnnnnnnnnnnnnnnnnnnnnnnnnnnnnnnnnnnnnnnnnnnnnnnnnnnnnnnnnnnnnnnnnnnnnnnnnnnnnnnnnnnnnnnnnnnnnnnnnnnnnnnnnnnnnnnnnnnnnnnnnnnnnnnnnnnnnnnnnnnnnnnnnnnnnnnnnnnnnnnnnnnnnnnnnnnnnnnnnnnnnnnnnnnnnnnnnnnnnnnnnnnnnnnnnnnnnnnnnnnnnnnnnnnnnnnnnnnnnnnnnnnnnnnnnnnnnnnnnnnnnnnnnnnnnnnnnnnnnnnnnnnnnnnnnnnnnnnnnnnnnnnnnnnnnnnnnnnnnnnnnnnnnnnnnnnnnnnnnnnnnnnnnnnnnnnnnnnnnnnnnnnnnnnnnnnnnnnnnnnnnnnnnnnnnnnnnnnnnnnnnnnnnnnnnnnnnnnnnnnnnnnnnnnnnnnnnnnnnnnnnnnnnnnnnnnnnnnnnnnnnnnnnnnnnnnnnnnnnnnnnnnnnnnnnnnnnnnnnnnnnnnnnnnnnnnnnnnnnnnnnnnnnnnnnnnnnnnnnnnnnnnnnnnnnnnnnnnnnnnnnnnnnnnnnnnnnnnnnnnnnnnnnnnnnnnnnnnnnnnnnnnnnnnnnnnnnnnnnnnnnnnnnnnnnnnnnnnnnnnnnnnnnnnnnnnnnnnnnnnnnnnnnnnnnnnnnnnnnnnnnnnnnnnnnnnnnnnnnnnnnnnnnnnnnnnnnnnnnnnnnnnnnnnnnnnnnnnnnnnnnnnnnnnnnnnnnnnnnnnnnnnnnnnnnnnnnnnnnnnnnnnnnnnnnnnnnnnnnnnnnnnnnnnnnnnnnnnnnnnnnnnnnnnnnnnnnnnnnnnnnnnnnnnnnnnnnnnnnnnnnnnnnnnnnnnnnnnnnnnnnnnnnnnnnnnnnnnnnnnnnnnnnnnnnnnnnnnnnnnnnnnnnnnnnnnnnnnnnnnnnnnnnnnnnnnnnnnnnnnnnnnnnnnnnnnnnnnnnnnnnnnnnnnnnnnnnnnnnnnnnnnnnnnnnnnnnnnnnnnnnnnnnnnnnnnnnnnnnnnnnnnnnnnnnnnnnnnnnnnnnnnnnnnnnnnnnnnnnnnnnnnnnnnnnnnnnnnnnnnnnnnnnnnnnnnnnnnnnnnnnnnnnnnnnnnnnnnnnnnnnnnnnnnnnnnnnnnnnnnnnnnnnnnnnnnnnnnnnnnnnnnnnnnnnnnnnnnnnnnnnnnnnnnnnnnnnnnnnnnnnnnnnnnnnnnnnnnnnnnnnnnnnnnnnnnnnnnnnnnnnnnnnnnnnnnnnnnnnnnnnnnnnnnnnnnnnnnnnnnnnnnnnnnnnnnnnnnnnnnnnnnnnnnnnnnnnnnnnnnnnnnnnnnnnnnnnnnnnnnnnnnnnnnnnnnnnnnnnnnnnnnnnnnnnnnnnnnnnnnnnnnnnnnnnnnnnnnnnnnnnnnnnnnnnnnnnnnnnnnnnnnnnnnnnnnnnnnnnnnnnnnnnnnnnnnnnnnnnnnnnnnnnnnnnnnnnnnnnnnnnnnnnnnnnnnnnnnnnnnnnnnnnnnnnnnnnnnnnnnnnnnnnnnnnnnnnnnnnnnnnnnnnnnnnnnnnnnnnnnnnnnnnnnnnnnnnnnnnnnnnnnnnnnnnnnnnnnnnnnnnnnnnnnnnnnnnnnnnnnnnnnnnnnnnnnnnnnnnnnnnnnnnnnnnnnnnnnnnnnnnnnnnnnnnnnnnnnnnnnnnnnnnnnnnnnnnnnnnnnnnnnnnnnnnnnnnnnnnnnnnnnnnnnnnnnnnnnnnnnnnnnnnnnnnnnnnnnnnnnnnnnnnnnnnnnnnnnnnnnnnnnnnnnnnnnnnnnnnnnnnnnnnnnnnnnnnnnnnnnnnnnnnnnnnnnnnnnnnnnnnnnnnnnnnnnnnnnnnnnnnnnnnnnnnnnnnnnnnnnnnnnnnnnnnnnnnnnnnnnnnnnnnnnnnnnnnnnnnnnnnnnnnnnnnnnnnnnnnnnnnnnnnnnnnnnnnnnnnnnnnnnnnnnnnnnnnnnnnnnnnnnnnnnnnnnnnnnnnnnnnnnnnnnnnnnnnnnnnnnnnnnnnnnnnnnnnnnnnnnnnnnnnnnnnnnnnnnnnnnnnnnnnnnnnnnnnnnnnnnnnnnnnnnnnnnnnnnnnnnnnnnnnnnnnnnnnnnnnnnnnnnnnnnnnnnnnnnnnnnnnnnnnnnnnnnnnnnnnnnnnnnnnnnnnnnnnnnnnnnnnnnnnnnnnnnnnnnnnnnnnnnnnnnnnnnnnnnnnnnnnnnnnnnnnnnnnnnnnnnnnnnnnnnnnnnnnnnnnnnnnnnnnnnnnnnnnnnnnnnnnnnnnnnnnnnnnnnnnnnnnnnnnnnnnnnnnnnnnnnnnnnnnnnnnnnnnnnnnnnnnnnnnnnnnnnnnnnnnnnnnnnnnnnnnnnnnnnnnnnnnnnnnnnnnnnnnnnnnnnnnnnnnnnnnnnnnnnnnnnnnnnnnnnnnnnnnnnnnnnnnnnnnnnnnnnnnnnnnnnnnnnnnnnnnnnnnnnnnnnnnnnnnnnnnnnnnnnnnnnnnnnnnnnnnnnnnnnnnnnnnnnnnnnnnnnnnnnnnnnnnnnnnnnnnnnnnnnnnnnnnnnnnnnnnnnnnnnnnnnnnnnnnnnnnnnnnnnnnnnnnnnnnnnnnnnnnnnnnnnnnnnnnnnnnnnnnnnnnnnnnnnnnnnnnnnnnnnnnnnnnnnnnnnnnnnnnnnnnnnnnnnnnnnnnnnnnnnnnnnnnnnnnnnnnnnnnnnnnnnnnnnnnnnnnnnnnnnnnnnnnnnnnnnnnnnnnnnnnnnnnnnnnnnnnnnnnnnnnnnnnnnnnnnnnnnnnnnnnnnnnnnnnnnnnnnnnnnnnnnnnnnnnnnnnnnnnnnnnnnnnnnnnnnnnnnnnnnnnnnnnnnnnnnnnnnnnnnnnnnnnnnnnnnnnnnnnnnnnnnnnnnnnnnnnnnnnnnnnnnnnnnnnnnnnnnnnnnnnnnnnnnnnnnnnnnnnnnnnnnnnnnnnnnnnnnnnnnnnnnnnnnnnnnnnnnnnnnnnnnnnnnnnnnnnnnnnnnnnnnnnnnnnnnnnnnnnnnnnnnnnnnnnnnnnnnnnnnnnnnnnnnnnnnnnnnnnnnnnnnnnnnnnnnnnnnnnnnnnnnnnnnnnnnnnnnnnnnnnnnnnnnnnnnnnnnnnnnnnnnnnnnnnnnnnnnnnnnnnnnnnnnnnnnnnnnnnnnnnnnnnnnnnnnnnnnnnnnnnnnnnnnnnnnnnnnnnnnnnnnnnnnnnnnnnnnnnnnnnnnnnnnnnnnnnnnnnnnnnnnnnnnnnnnnnnnnnnnnnnnnnnnnnnnnnnnnnnnnnnnnnnnnnnnnnnnnnnnnnnnnnnnnnnnnnnnnnnnnnnnnnnnnnnnnnnnnnnnnnnnnnnnnnnnnnnnnnnnnnnnnnnnnnnnnnnnnnnnnnnnnnnnnnnnnnnnnnnnnnnnnnnnnnnnnnnnnnnnnnnnnnnnnnnnnnnnnnnnnnnnnnnnnnnnnnnnnnnnnnnnnnnnnnnnnnnnnnnnnnnnnnnnnnnnnnnnnnnnnnnnnnnnnnnnnnnnnnnnnnnnnnnnnnnnnnnnnnnnnnnnnnnnnnnnnnnnnnnnnnnnnnnnnnnnnnnnnnnnnnnnnnnnnnnnnnnnnnnnnnnnnnnnnnnnnnnnnnnnnnnnnnnnnnnnnnnnnnnnnnnnnnnnnnnnnnnnnnnnnnnnnnnnnnnnnnnnnnnnnnnnnnnnnnnnnnnnnnnnnnnnnnnnnnnnnnnnnnnnnnnnnnnnnnnnnnnnnnnnnnnnnnnnnnnnnnnnnnnnnnnnnnnnnnnnnnnnnnnnnnnnnnnnnnnnnnnnnnnnnnnnnnnnnnnnnnnnnnnnnnnnnnnnnnnnnnnnnnnnnnnnnnnnnnnnnnnnnnnnnnnnnnnnnnnnnnnnnnnnnnnnnnnnnnnnnnnnnnnnnnnnnnnnnnnnnnnnnnnnnnnnnnnnnnnnnnnnnnnnnnnnnnnnnnnnnnnnnnnnnnnnnnnnnnnnnnnnnnnnnnnnnnnnnnnnnnnnnnnnnnnnnnnnnnnnnnnnnnnnnnnnnnnnnnnnnnnnnnnnnnnnnnnnnnnnnnnnnnnnnnnnnnnnnnnnnnnnnnnnnnnnnnnnnnnnnnnnnnnnnnnnnnnnnnnnnnnnnnnnnnnnnnnnnnnnnnnnnnnnnnnnnnnnnnnnnnnnnnnnnnnnnnnnnnnnnnnnnnnnnnnnnnnnnnnnnnnnnnnnnnnnnnnnnnnnnnnnnnnnnnnnnnnnnnnnnnnnnnnnnnnnnnnnnnnnnnnnnnnnnnnnnnnnnnnnnnnnnnnnnnnnnnnnnnnnnnnnnnnnnnnnnnnnnnnnnnnnnnnnnnnnnnnnnnnnnnnnnnnnnnnnnnnnnnnnnnnnnnnnnnnnnnnnnnnnnnnnnnnnnnnnnnnnnnnnnnnnnnnnnnnnnnnnnnnnnnnnnnnnnnnnnnnnnnnnnnnnnnnnnnnnnnnnnnnnnnnnnnnnnnnnnnnnnnnnnnnnnnnnnnnnnnnnnnnnnnnnnnnnnnnnnnnnnnnnnnnnnnnnnnnnnnnnnnnnnnnnnnnnnnnnnnnnnnnnnnnnnnnnnnnnnnnnnnnnnnnnnnnnnnnnnnnnnnnnnnnnnnnnnnnnnnnnnnnnnnnnnnnnnnnnnnnnnnnnnnnnnnnnnnnnnnnnnnnnnnnnnnnnnnnnnnnnnnnnnnnnnnnnnnnnnnnnnnnnnnnnnnnnnnnnnnnnnnnnnnnnnnnnnnnnnnnnnnnnnnnnnnnnnnnnnnnnnnnnnnnnnnnnnnnnnnnnnnnnnnnnnnnnnnnnnnnnnnnnnnnnnnnnnnnnnnnnnnnnnnnnnnnnnnnnnnnnnnnnnnnnnnnnnnnnnnnnnnnnnnnnnnnnnnnnnnnnnnnnnnnnnnnnnnnnnnnnnnnnnnnnnnnnnnnnnnnnnnnnnnnnnnnnnnnnnnnnnnnnnnnnnnnnnnnnnnnnnnnnnnnnnnnnnnnnnnnnnnnnnnnnnnnnnnnnnnnnnnnnnnnnnnnnnnnnnnnnnnnnnnnnnnnnnnnnnnnnnnnnnnnnnnnnnnnnnnnnnnnnnnnnnnnnnnnnnnnnnnnnnnnnnnnnnnnnnnnnnnnnnnnnnnnnnnnnnnnnnnnnnnnnnnnnnnnnnnnnnnnnnnnnnnnnnnnnnnnnnnnnnnnnnnnnnnnnnnnnnnnnnnnnnnnnnnnnnnnnnnnnnnnnnnnnnnnnnnnnnnnnnnnnnnnnnnnnnnnnnnnnnnnnnnnnnnnnnnnnnnnnnnnnnnnnnnnnnnnnnnnnnnnnnnnnnnnnnnnnnnnnnnnnnnnnnnnnnnnnnnnnnnnnnnnnnnnnnnnnnnnnnnnnnnnnnnnnnnnnnnnnnnnnnnnnnnnnnnnnnnnnnnnnnnnnnnnnnnnnnnnnnnnnnnnnnnnnnnnnnnnnnnnnnnnnnnnnnnnnnnnnnnnnnnnnnnnnnnnnnnnnnnnnnnnnnnnnnnnnnnnnnnnnnnnnnnnnnnnnnnnnnnnnnnnnnnnnnnnnnnnnnnnnnnnnnnnnnnnnnnnnnnnnnnnnnnnnnnnnnnnnnnnnnnnnnnnnnnnnnnnnnnnnnnnnnnnnnnnnnnnnnnnnnnnnnnnnnnnnnnnnnnnnnnnnnnnnnnnnnnnnnnnnnnnnnnnnnnnnnnnnnnnnnnnnnnnnnnnnnnnnnnnnnnnnnnnnnnnnnnnnnnnnnnnnnnnnnnnnnnnnnnnnnnnnnnnnnnnnnnnnnnnnnnnnnnnnnnnnnnnnnnnnnnnnnnnnnnnnnnnnnnnnnnnnnnnnnnnnnnnnnnnnnnnnnnnnnnnnnnnnnnnnnnnnnnnnnnnnnnnnnnnnnnnnnnnnnnnnnnnnnnnnnnnnnnnnnnnnnnnnnnnnnnnnnnnnnnnnnnnnnnnnnnnnnnnnnnnnnnnnnnnnnnnnnnnnnnnnnnnnnnnnnnnnnnnnnnnnnnnnnnnnnnnnnnnnnnnnnnnnnnnnnnnnnnnnnnnnnnnnnnnnnnnnnnnnnnnnnnnnnnnnnnnnnnnnnnnnnnnnnnnnnnnnnnnnnnnnnnnnnnnnnnnnnnnnnnnnnnnnnnnnnnnnnnnnnnnnnnnnnnnnnnnnnnnnnnnnnnnnnnnnnnnnnnnnnnnnnnnnnnnnnnnnnnnnnnnnnnnnnnnnnnnnnnnnnnnnnnnnnnnnnnnnnnnnnnnnnnnnnnnnnnnnnnnnnnnnnnnnnnnnnnnnnnnnnnnnnnnnnnnnnnnnnnnnnnnnnnnnnnnnnnnnnnnnnnnnnnnnnnnnnnnnnnnnnnnnnnnnnnnnnnnnnnnnnnnnnnnnnnnnnnnnnnnnnnnnnnnnnnnnnnnnnnnnnnnnnnnnnnnnnnnnnnnnnnnnnnnnnnnnnnnnnnnnnnnnnnnnnnnnnnnnnnnnnnnnnnnnnnnnnnnnnnnnnnnnnnnnnnnnnnnnnnnnnnnnnnnnnnnnnnnnnnnnnnnnnnnnnnnnnnnnnnnnnnnnnnnnnnnnnnnnnnnnnnnnnnnnnnnnnnnnnnnnnnnnnnnnnnnnnnnnnnnnnnnnnnnnnnnnnnnnnnnnnnnnnnnnnnnnnnnnnnnnnnnnnnnnnnnnnnnnnnnnnnnnnnnnnnnnnnnnnnnnnnnnnnnnnnnnnnnnnnnnnnnnnnnnnnnnnnnnnnnnnnnnnnnnnnnnnnnnnnnnnnnnnnnnnnnnnnnnnnnnnnnnnnnnnnnnnnnnnnnnnnnnnnnnnnnnnnnnnnnnnnnnnnnnnnnnnnnnnnnnnnnnnnnnnnnnnnnnnnnnnnnnnnnnnnnnnnnnnnnnnnnnnnnnnnnnnnnnnnnnnnnnnnnnnnnnnnnnnnnnnnnnnnnnnnnnnnnnnnnnnnnnnnnnnnnnnnnnnnnnnnnnnnnnnnnnnnnnnnnnnnnnnnnnnnnnnnnnnnnnnnnnnnnnnnnnnnnnnnnnnnnnnnnnnnnnnnnnnnnnnnnnnnnnnnnnnnnnnnnnnnnnnnnnnnnnnnnnnnnnnnnnnnnnnnnnnnnnnnnnnnnnnnnnnnnnnnnnnnnnnnnnnnnnnnnnnnnnnnnnnnnnnnnnnnnnnnnnnnnnnnnnnnnnnnnnnnnnnnnnnnnnnnnnnnnnnnnnnnnnnnnnnnnnnnnnnnnnnnnnnnnnnnnnnnnnnnnnnnnnnnnnnnnnnnnnnnnnnnnnnnnnnnnnnnnnnnnnnnnnnnnnnnnnnnnnnnnnnnnnnnnnnnnnnnnnnnnnnnnnnnnnnnnnnnnnnnnnnnnnnnnnnnnnnnnnnnnnnnnnnnnnnnnnnnnnnnnnnnnnnnnnnnnnnnnnnnnnnnnnnnnnnnnnnnnnnnnnnnnnnnnnnnnnnnnnnnnnnnnnnnnnnnnnnnnnnnnnnnnnnnnnnnnnnnnnnnnnnnnnnnnnnnnnnnnnnnnnnnnnnnnnnnnnnnnnnnnnnnnnnnnnnnnnnnnnnnnnnnnnnnnnnnnnnnnnnnnnnnnnnnnnnnnnnnnnnnnnnnnnnnnnnnnnnnnnnnnnnnnnnnnnnnnnnnnnnnnnnnnnnnnnnnnnnnnnnnnnnnnnnnnnnnnnnnnnnnnnnnnnnnnnnnnnnnnnnnnnnnnnnnnnnnnnnnnnnnnnnnnnnnnnnnnnnnnnnnnnnnnnnnnnnnnnnnnnnnnnnnnnnnnnnnnnnnnnnnnnnnnnnnnnnnnnnnnnnnnnnnnnnnnnnnnnnnnnnnnnnnnnnnnnnnnnnnnnnnnnnnnnnnnnnnnnnnnnnnnnnnnnnnnnnnnnnnnnnnnnnnnnnnnnnnnnnnnnnnnnnnnnnnnnnnnnnnnnnnnnnnnnnnnnnnnnnnnnnnnnnnnnnnnnnnnnnnnnnnnnnnnnnnnnnnnnnnnnnnnnnnnnnnnnnnnnnnnnnnnnnnnnnnnnnnnnnnnnnnnnnnnnnnnnnnnnnnnnnnnnnnnnnnnnnnnnnnnnnnnnnnnnnnnnnnnnnnnnnnnnnnnnnnnnnnnnnnnnnnnnnnnnnnnnnnnnnnnnnnnnnnnnnnnnnnnnnnnnnnnnnnnnnnnnnnnnnnnnnnnnnnnnnnnnnnnnnnnnnnnnnnnnnnnnnnnnnnnnnnnnnnnnnnnnnnnnnnnnnnnnnnnnnnnnnnnnnnnnnnnnnnnnnnnnnnnnnnnnnnnnnnnnnnnnnnnnnnnnnnnnnnnnnnnnnnnnnnnnnnnnnnnnnnnnnnnnnnnnnnnnnnnnnnnnnnnnnnnnnnnnnnnnnnnnnnnnnnnnnnnnnnnnnnnnnnnnnnnnnnnnnnnnnnnnnnnnnnnnnnnnnnnnnnnnnnnnnnnnnnnnnnnnnnnnnnnnnnnnnnnnnnnnnnnnnnnnnnnnnnnnnnnnnnnnnnnnnnnnnnnnnnnnnnnnnnnnnnnnnnnnnnnnnnnnnnnnnnnnnnnnnnnnnnnnnnnnnnnnnnnnnnnnnnnnnnnnnnnnnnnnnnnnnnnnnnnnnnnnnnnnnnnnnnnnnnnnnnnnnnnnnnnnnnnnnnnnnnnnnnnnnnnnnnnnnnnnnnnnnnnnnnnnnnnnnnnnnnnnnnnnnnnnnnnnnnnnnnnnnnnnnnnnnnnnnnnnnnnnnnnnnnnnnnnnnnnnnnnnnnnnnnnnnnnnnnnnnnnnnnnnnnnnnnnnnnnnnnnnnnnnnnnnnnnnnnnnnnnnnnnnnnnnnnnnnnnnnnnnnnnnnnnnnnnnnnnnnnnnnnnnnnnnnnnnnnnnnnnnnnnnnnnnnnnnnnnnnnnnnnnnnnnnnnnnnnnnnnnnnnnnnnnnnnnnnnnnnnnnnnnnnnnnnnnnnnnnnnnnnnnnnnnnnnnnnnnnnnnnnnnnnnnnnnnnnnnnnnnnnnnnnnnnnnnnnnnnnnnnnnnnnnnnnnnnnnnnnnnnnnnnnnnnnnnnnnnnnnnnnnnnnnnnnnnnnnnnnnnnnnnnnnnnnnnnnnnnnnnnnnnnnnnnnnnnnnnnnnnnnnnnnnnnnnnnnnnnnnnnnnnnnnnnnnnnnnnnnnnnnnnnnnnnnnnnnnnnnnnnnnnnnnnnnnnnnnnnnnnnnnnnnnnnnnnnnnnnnnnnnnnnnnnnnnnnnnnnnnnnnnnnnnnnnnnnnnnnnnnnnnnnnnnnnnnnnnnnnnnnnnnnnnnnnnnnnnnnnnnnnnnnnnnnnnnnnnnnnnnnnnnnnnnnnnnnnnnnnnnnnnnnnnnnnnnnnnnnnnnnnnnnnnnnnnnnnnnnnnnnnnnnnnnnnnnnnnnnnnnnnnnnnnnnnnnnnnnnnnnnnnnnnnnnnnnnnnnnnnnnnnnnnnnnnnnnnnnnnnnnnnnnnnnnnnnnnnnnnnnnnnnnnnnnnnnnnnnnnnnnnnnnnnnnnnnnnnnnnnnnnnnnnnnnnnnnnnnnnnnnnnnnnnnnnnnnnnnnnnnnnnnnnnnnnnnnnnnnnnnnnnnnnnnnnnnnnnnnnnnnnnnnnnnnnnnnnnnnnnnnnnnnnnnnnnnnnnnnnnnnnnnnnnnnnnnnnnnnnnnnnnnnnnnnnnnnnnnnnnnnnnnnnnnnnnnnnnnnnnnnnnnnnnnnnnnnnnnnnnnnnnnnnnnnnnnnnnnnnnnnnnnnnnnnnnnnnnnnnnnnnnnnnnnnnnnnnnnnnnnnnnnnnnnnnnnnnnnnnnnnnnnnnnnnnnnnnnnnnnnnnnnnnnnnnnnnnnnnnnnnnnnnnnnnnnnnnnnnnnnnnnnnnnnnnnnnnnnnnnnnnnnnnnnnnnnnnnnnnnnnnnnnnnnnnnnnnnnnnnnnnnnnnnnnnnnnnnnnnnnnnnnnnnnnnnnnnnnnnnnnnnnnnnnnnnnnnnnnnnnnnnnnnnnnnnnnnnnnnnnnnnnnnnnnnnnnnnnnnnnnnnnnnnnnnnnnnnnnnnnnnnnnnnnnnnnnnnnnnnnnnnnnnnnnnnnnnnnnnnnnnnnnnnnnnnnnnnnnnnnnnnnnnnnnnnnnnnnnnnnnnnnnnnnnnnnnnnnnnnnnnnnnnnnnnnnnnnnnnnnnnnnnnnnnnnnnnnnnnnnnnnnnnnnnnnnnnnnnnnnnnnnnnnnnnnnnnnnnnnnnnnnnnnnnnnnnnnnnnnnnnnnnnnnnnnnnnnnnnnnnnnnnnnnnnnnnnnnnnnnnnnnnnnnnnnnnnnnnnnnnnnnnnnnnnnnnnnnnnnnnnnnnnnnnnnnnnnnnnnnnnnnnnnnnnnnnnnnnnnnnnnnnnnnnnnnnnnnnnnnnnnnnnnnnnnnnnnnnnnnnnnnnnnnnnnnnnnnnnnnnnnnnnnnnnnnnnnnnnnnnnnnnnnnnnnnnnnnnnnnnnnnnnnnnnnnnnnnnnnnnnnnnnnnnnnnnnnnnnnnnnnnnnnnnnnnnnnnnnnnnnnnnnnnnnnnnnnnnnnnnnnnnnnnnnnnnnnnnnnnnnnnnnnnnnnnnnnnnnnnnnnnnnnnnnnnnnnnnnnnnnnnnnnnnnnnnnnnnnnnnnnnnnnnnnnnnnnnnnnnnnnnnnnnnnnnnnnnnnnnnnnnnnnnnnnnnnnnnnnnnnnnnnnnnnnnnnnnnnnnnnnnnnnnnnnnnnnnnnnnnnnnnnnnnnnnnnnnnnnnnnnnnnnnnnnnnnnnnnnnnnnnnnnnnnnnnnnnnnnnnnnnnnnnnnnnnnnnnnnnnnnnnnnnnnnnnnnnnnnnnnnnnnnnnnnnnnnnnnnnnnnnnnnnnnnnnnnnnnnnnnnnnnnnnnnnnnnnnnnnnnnnnnnnnnnnnnnnnnnnnnnnnnnnnnnnnnnnnnnnnnnnnnnnnnnnnnnnnnnnnnnnnnnnnnnnnnnnnnnnnnnnnnnnnnnnnnnnnnnnnnnnnnnnnnnnnnnnnnnnnnnnnnnnnnnnnnnnnnnnnnnnnnnnnnnnnnnnnnnnnnnnnnnnnnnnnnnnnnnnnnnnnnnnnnnnnnnnnnnnnnnnnnnnnnnnnnnnnnnnnnnnnnnnnnnnnnnnnnnnnnnnnnnnnnnnnnnnnnnnnnnnnnnnnnnnnnnnnnnnnnnnnnnnnnnnnnnnnnnnnnnnnnnnnnnnnnnnnnnnnnnnnnnnnnnnnnnnnnnnnnnnnnnnnnnnnnnnnnnnnnnnnnnnnnnnnnnnnnnnnnnnnnnnnnnnnnnnnnnnnnnnnnnnnnnnnnnnnnnnnnnnnnnnnnnnnnnnnnnnnnnnnnnnnnnnnnnnnnnnnnnnnnnnnnnnnnnnnnnnnnnnnnnnnnnnnnnnnnnnnnnnnnnnnnnnnnnnnnnnnnnnnnnnnnnnnnnnnnnnnnnnnnnnnnnnnnnnnnnnnnnnnnnnnnnnnnnnnnnnnnnnnnnnnnnnnnnnnnnnnnnnnnnnnnnnnnnnnnnnnnnnnnnnnnnnnnnnnnnnnnnnnnnnnnnnnnnnnnnnnnnnnnnnnnnnnnnnnnnnnnnnnnnnnnnnnnnnnnnnnnnnnnnnnnnnnnnnnnnnnnnnnnnnnnnnnnnnnnnnnnnnnnnnnnnnnnnnnnnnnnnnnnnnnnnnnnnnnnnnnnnnnnnnnnnnnnnnnnnnnnnnnnnnnnnnnnnnnnnnnnnnnnnnnnnnnnnnnnnnnnnnnnnnnnnnnnnnnnnnnnnnnnnnnnnnnnnnnnnnnnnnnnnnnnnnnnnnnnnnnnnnnnnnnnnnnnnnnnnnnnnnnnnnnnnnnnnnnnnnnnnnnnnnnnnnnnnnnnnnnnnnnnnnnnnnnnnnnnnnnnnnnnnnnnnnnnnnnnnnnnnnnnnnnnnnnnnnnnnnnnnnnnnnnnnnnnnnnnnnnnnnnnnnnnnnnnnnnnnnnnnnnnnnnnnnnnnnnnnnnnnnnnnnnnnnnnnnnnnnnnnnnnnnnnnnnnnnnnnnnnnnnnnnnnnnnnnnnnnnnnnnnnnnnnnnnnnnnnnnnnnnnnnnnnnnnnnnnnnnnnnnnnnnnnnnnnnnnnnnnnnnnnnnnnnnnnnnnnnnnnnnnnnnnnnnnnnnnnnnnnnnnnnnnnnnnnnnnnnnnnnnnnnnnnnnnnnnnnnnnnnnnnnnnnnnnnnnnnnnnnnnnnnnnnnnnnnnnnnnnnnnnnnnnnnnnnnnnnnnnnnnnnnnnnnnnnnnnnnnnnnnnnnnnnnnnnnnnnnnnnnnnnnnnnnnnnnnnnnnnnnnnnnnnnnnnnnnnnnnnnnnnnnnnnnnnnnnnnnnnnnnnnnnnnnnnnnnnnnnnnnnnnnnnnnnnnnnnnnnnnnnnnnnnnnnnnnnnnnnnnnnnnnnnnnnnnnnnnnnnnnnnnnnnnnnnnnnnnnnnnnnnnnnnnnnnnnnnnnnnnnnnnnnnnnnnnnnnnnnnnnnnnnnnnnnnnnnnnnnnnnnnnnnnnnnnnnnnnnnnnnnnnnnnnnnnnnnnnnnnnnnnnnnnnnnnnnnnnnnnnnnnnnnnnnnnnnnnnnnnnnnnnnnnnnnnnnnnnnnnnnnnnnnnnnnnnnnnnnnnnnnnnnnnnnnnnnnnnnnnnnnnnnnnnnnnnnnnnnnnnnnnnnnnnnnnnnnnnnnnnnnnnnnnnnnnnnnnnnnnnnnnnnnnnnnnnnnnnnnnnnnnnnnnnnnnnnnnnnnnnnnnnnnnnnnnnnnnnnnnnnnnnnnnnnnnnnnnnnnnnnnnnnnnnnnnnnnnnnnnnnnnnnnnnnnnnnnnnnnnnnnnnnnnnnnnnnnnnnnnnnnnnnnnnnnnnnnnnnnnnnnnnnnnnnnnnnnnnnnnnnnnnnnnnnnnnnnnnnnnnnnnnnnnnnnnnnnnnnnnnnnnnnnnnnnnnnnnnnnnnnnnnnnnnnnnnnnnnnnnnnnnnnnnnnnnnnnnnnnnnnnnnnnnnnnnnnnnnnnnnnnnnnnnnnnnnnnnnnnnnnnnnnnnnnnnnnnnnnnnnnnnnnnnnnnnnnnnnnnnnnnnnnnnnnnnnnnnnnnnnnnnnnnnnnnnnnnnnnnnnnnnnnnnnnnnnnnnnnnnnnnnnnnnnnnnnnnnnnnnnnnnnnnnnnnnnnnnnnnnnnnnnnnnnnnnnnnnnnnnnnnnnnnnnnnnnnnnnnnnnnnnnnnnnnnnnnnnnnnnnnnnnnnnnnnnnnnnnnnnnnnnnnnnnnnnnnnnnnnnnnnnnnnnnnnnnnnnnnnnnnnnnnnnnnnnnnnnnnnnnnnnnnnnnnnnnnnnnnnnnnnnnnnnnnnnnnnnnnnnnnnnnnnnnnnnnnnnnnnnnnnnnnnnnnnnnnnnnnnnnnnnnnnnnnnnnnnnnnnnnnnnnnnnnnnnnnnnnnnnnnnnnnnnnnnnnnnnnnnnnnnnnnnnnnnnnnnnnnnnnnnnnnnnnnnnnnnnnnnnnnnnnnnnnnnnnnnnnnnnnnnnnnnnnnnnnnnnnnnnnnnnnnnnnnnnnnnnnnnnnnnnnnnnnnnnnnnnnnnnnnnnnnnnnnnnnnnnnnnnnnnnnnnnnnnnnnnnnnnnnnnnnnnnnnnnnnnnnnnnnnnnnnnnnnnnnnnnnnnnnnnnnnnnnnnnnnnnnnnnnnnnnnnnnnnnnnnnnnnnnnnnnnnnnnnnnnnnnnnnnnnnnnnnnnnnnnnnnnnnnnnnnnnnnnnnnnnnnnnnnnnnnnnnnnnnnnnnnnnnnnnnnnnnnnnnnnnnnnnnnnnnnnnnnnnnnnnnnnnnnnnnnnnnnnnnnnnnnnnnnnnnnnnnnnnnnnnnnnnnnnnnnnnnnnnnnnnnnnnnnnnnnnnnnnnnnnnnnnnnnnnnnnnnnnnnnnnnnnnnnnnnnnnnnnnnnnnnnnnnnnnnnnnnnnnnnnnnnnnnnnnnnnnnnnnnnnnnnnnnnnnnnnnnnnnnnnnnnnnnnnnnnnnnnnnnnnnnnnnnnnnnnnnnnnnnnnnnnnnnnnnnnnnnnnnnnnnnnnnnnnnnnnnnnnnnnnnnnnnnnnnnnnnnnnnnnnnnnnnnnnnnnnnnnnnnnnnnnnnnnnnnnnnnnnnnnnnnnnnnnnnnnnnnnnnnnnnnnnnnnnnnnnnnnnnnnnnnnnnnnnnnnnnnnnnnnnnnnnnnnnnnnnnnnnnnnnnnnnnnnnnnnnnnnnnnnnnnnnnnnnnnnnnnnnnnnnnnnnnnnnnnnnnnnnnnnnnnnnnnnnnnnnnnnnnnnnnnnnnnnnnnnnnnnnnnnnnnnnnnnnnnnnnnnnnnnnnnnnnnnnnnnnnnnnnnnnnnnnnnnnnnnnnnnnnnnnnnnnnnnnnnnnnnnnnnnnnnnnnnnnnnnnnnnnnnnnnnnnnnnnnnnnnnnnnnnnnnnnnnnnnnnnnnnnnnnnnnnnnnnnnnnnnnnnnnnnnnnnnnnnnnnnnnnnnnnnnnnnnnnnnnnnnnnnnnnnnnnnnnnnnnnnnnnnnnnnnnnnnnnnnnnnnnnnnnnnnnnnnnnnnnnnnnnnnnnnnnnnnnnnnnnnnnnnnnnnnnnnnnnnnnnnnnnnnnnnnnnnnnnnnnnnnnnnnnnnnnnnnnnnnnnnnnnnnnnnnnnnnnnnnnnnnnnnnnnnnnnnnnnnnnnnnnnnnnnnnnnnnnnnnnnnnnnnnnnnnnnnnnnnnnnnnnnnnnnnnnnnnnnnnnnnnnnnnnnnnnnnnnnnnnnnnnnnnnnnnnnnnnnnnnnnnnnnnnnnnnnnnnnnnnnnnnnnnnnnnnnnnnnnnnnnnnnnnnnnnnnnnnnnnnnnnnnnnnnnnnnnnnnnnnnnnnnnnnnnnnnnnnnnnnnnnnnnnnnnnnnnnnnnnnnnnnnnnnnnnnnnnnnnnnnnnnnnnnnnnnnnnnnnnnnnnnnnnnnnnnnnnnnnnnnnnnnnnnnnnnnnnnnnnnnnnnnnnnnnnnnnnnnnnnnnnnnnnnnnnnnnnnnnnnnnnnnnnnnnnnnnnnnnnnnnnnnnnnnnnnnnnnnnnnnnnnnnnnnnnnnnnnnnnnnnnnnnnnnnnnnnnnnnnnnnnnnnnnnnnnnnnnnnnnnnnnnnnnnnnnnnnnnnnnnnnnnnnnnnnnnnnnnnnnnnnnnnnnnnnnnnnnnnnnnnnnnnnnnnnnnnnnnnnnnnnnnnnnnnnnnnnnnnnnnnnnnnnnnnnnnnnnnnnnnnnnnnnnnnnnnnnnnnnnnnnnnnnnnnnnnnnnnnnnnnnnnnnnnnnnnnnnnnnnnnnnnnnnnnnnnnnnnnnnnnnnnnnnnnnnnnnnnnnnnnnnnnnnnnnnnnnnnnnnnnnnnnnnnnnnnnnnnnnnnnnnnnnnnnnnnnnnnnnnnnnnnnnnnnnnnnnnnnnnnnnnnnnnnnnnnnnnnnnnnnnnnnnnnnnnnnnnnnnnnnnnnnnnnnnnnnnnnnnnnnnnnnnnnnnnnnnnnnnnnnnnnnnnnnnnnnnnnnnnnnnnnnnnnnnnnnnnnnnnnnnnnnnnnnnnnnnnnnnnnnnnnnnnnnnnnnnnnnnnnnnnnnnnnnnnnnnnnnnnnnnnnnnnnnnnnnnnnnnnnnnnnnnnnnnnnnnnnnnnnnnnnnnnnnnnnnnnnnnnnnnnnnnnnnnnnnnnnnnnnnnnnnnnnnnnnnnnnnnnnnnnnnnnnnnnnnnnnnnnnnnnnnnnnnnnnnnnnnnnnnnnnnnnnnnnnnnnnnnnnnnnnnnnnnnnnnnnnnnnnnnnnnnnnnnnnnnnnnnnnnnnnnnnnnnnnnnnnnnnnnnnnnnnnnnnnnnnnnnnnnnnnnnnnnnnnnnnnnnnnnnnnnnnnnnnnnnnnnnnnnnnnnnnnnnnnnnnnnnnnnnnnnnnnnnnnnnnnnnnnnnnnnnnnnnnnnnnnnnnnnnnnnnnnnnnnnnnnnnnnnnnnnnnnnnnnnnnnnnnnnnnnnnnnnnnnnnnnnnnnnnnnnnnnnnnnnnnnnnnnnnnnnnnnnnnnnnnnnnnnnnnnnnnnnnnnnnnnnnnnnnnnnnnnnnnnnnnnnnnnnnnnnnnnnnnnnnnnnnnnnnnnnnnnnnnnnnnnnnnnnnnnnnnnnnnnnnnnnnnnnnnnnnnnnnnnnnnnnnnnnnnnnnnnnnnnnnnnnnnnnnnnnnnnnnnnnnnnnnnnnnnnnnnnnnnnnnnnnnnnnnnnnnnnnnnnnnnnnnnnnnnnnnnnnnnnnnnnnnnnnnnnnnnnnnnnnnnnnnnnnnnnnnnnnnnnnnnnnnnnnnnnnnnnnnnnnnnnnnnnnnnnnnnnnnnnnnnnnnnnnnnnnnnnnnnnnnnnnnnnnnnnnnnnnnnnnnnnnnnnnnnnnnnnnnnnnnnnnnnnnnnnnnnnnnnnnnnnnnnnnnnnnnnnnnnnnnnnnnnnnnnnnnnnnnnnnnnnnnnnnnnnnnnnnnnnnnnnnnnnnnnnnnnnnnnnnnnnnnnnnnnnnnnnnnnnnnnnnnnnnnnnnnnnnnnnnnnnnnnnnnnnnnnnnnnnnnnnnnnnnnnnnnnnnnnnnnnnnnnnnnnnnnnnnnnnnnnnnnnnnnnnnnnnnnnnnnnnnnnnnnnnnnnnnnnnnnnnnnnnnnnnnnnnnnnnnnnnnnnnnnnnnnnnnnnnnnnnnnnnnnnnnnnnnnnnnnnnnnnnnnnnnnnnnnnnnnnnnnnnnnnnnnnnnnnnnnnnnnnnnnnnnnnnnnnnnnnnnnnnnnnnnnnnnnnnnnnnnnnnnnnnnnnnnnnnnnnnnnnnnnnnnnnnnnnnnnnnnnnnnnnnnnnnnnnnnnnnnnnnnnnnnnnnnnnnnnnnnnnnnnnnnnnnnnnnnnnnnnnnnnnnnnnnnnnnnnnnnnnnnnnnnnnnnnnnnnnnnnnnnnnnnnnnnnnnnnnnnnnnnnnnnnnnnnnnnnnnnnnnnnnnnnnnnnnnnnnnnnnnnnnnnnnnnnnnnnnnnnnnnnnnnnnnnnnnnnnnnnnnnnnnnnnnnnnnnnnnnnnnnnnnnnnnnnnnnnnnnnnnnnnnnnnnnnnnnnnnnnnnnnnnnnnnnnnnnnnnnnnnnnnnnnnnnnnnnnnnnnnnnnnnnnnnnnnnnnnnnnnnnnnnnnnnnnnnnnnnnnnnnnnnnnnnnnnnnnnnnnnnnnnnnnnnnnnnnnnnnnnnnnnnnnnnnnnnnnnnnnnnnnnnnnnnnnnnnnnnnnnnnnnnnnnnnnnnnnnnnnnnnnnnnnnnnnnnnnnnnnnnnnnnnnnnnnnnnnnnnnnnnnnnnnnnnnnnnnnnnnnnnnnnnnnnnnnnnnnnnnnnnnnnnnnnnnnnnnnnnnnnnnnnnnnnnnnnnnnnnnnnnnnnnnnnnnnnnnnnnnnnnnnnnnnnnnnnnnnnnnnnnnnnnnnnnnnnnnnnnnnnnnnnnnnnnnnnnnnnnnnnnnnnnnnnnnnnnnnnnnnnnnnnnnnnnnnnnnnnnnnnnnnnnnnnnnnnnnnnnnnnnnnnnnnnnnnnnnnnnnnnnnnnnnnnnnnnnnnnnnnnnnnnnnnnnnnnnnnnnnnnnnnnnnnnnnnnnnnnnnnnnnnnnnnnnnnnnnnnnnnnnnnnnnnnnnnnnnnnnnnnnnnnnnnnnnnnnnnnnnnnnnnnnnnnnnnnnnnnnnnnnnnnnnnnnnnnnnnnnnnnnnnnnnnnnnnnnnnnnnnnnnnnnnnnnnnnnnnnnnnnnnnnnnnnnnnnnnnnnnnnnnnnnnnnnnnnnnnnnnnnnnnnnnnnnnnnnnnnnnnnnnnnnnnnnnnnnnnnnnnnnnnnnnnnnnnnnnnnnnnnnnnnnnnnnnnnnnnnnnnnnnnnnnnnnnnnnnnnnnnnnnnnnnnnnnnnnnnnnnnnnnnnnnnnnnnnnnnnnnnnnnnnnnnnnnnnnnnnnnnnnnnnnnnnnnnnnnnnnnnnnnnnnnnnnnnnnnnnnnnnnnnnnnnnnnnnnnnnnnnnnnnnnnnnnnnnnnnnnnnnnnnnnnnnnnnnnnnnnnnnnnnnnnnnnnnnnnnnnnnnnnnnnnnnnnnnnnnnnnnnnnnnnnnnnnnnnnnnnnnnnnnnnnnnnnnnnnnnnnnnnnnnnnnnnnnnnnnnnnnnnnnnnnnnnnnnnnnnnnnnnnnnnnnnnnnnnnnnnnnnnnnnnnnnnnnnnnnnnnnnnnnnnnnnnnnnnnnnnnnnnnnnnnnnnnnnnnnnnnnnnnnnnnnnnnnnnnnnnnnnnnnnnnnnnnnnnnnnnnnnnnnnnnnnnnnnnnnnnnnnnnnnnnnnnnnnnnnnnnnnnnnnnnnnnnnnnnnnnnnnnnnnnnnnnnnnnnnnnnnnnnnnnnnnnnnnnnnnnnnnnnnnnnnnnnnnnnnnnnnnnnnnnnnnnnnnnnnnnnnnnnnnnnnnnnnnnnnnnnnnnnnnnnnnnnnnnnnnnnnnnnnnnnnnnnnnnnnnnnnnnnnnnnnnnnnnnnnnnnnnnnnnnnnnnnnnnnnnnnnnnnnnnnnnnnnnnnnnnnnnnnnnnnnnnnnnnnnnnnnnnnnnnnnnnnnnnnnnnnnnnnnnnnnnnnnnnnnnnnnnnnnnnnnnnnnnnnnnnnnnnnnnnnnnnnnnnnnnnnnnnnnnnnnnnnnnnnnnnnnnnnnnnnnnnnnnnnnnnnnnnnnnnnnnnnnnnnnnnnnnnnnnnnnnnnnnnnnnnnnnnnnnnnnnnnnnnnnnnnnnnnnnnnnnnnnnnnnnnnnnnnnnnnnnnnnnnnnnnnnnnnnnnnnnnnnnnnnnnnnnnnnnnnnnnnnnnnnnnnnnnnnnnnnnnnnnnnnnnnnnnnnnnnnnnnnnnnnnnnnnnnnnnnnnnnnnnnnnnnnnnnnnnnnnnnnnnnnnnnnnnnnnnnnnnnnnnnnnnnnnnnnnnnnnnnnnnnnnnnnnnnnnnnnnnnnnnnnnnnnnnnnnnnnnnnnnnnnnnnnnnnnnnnnnnnnnnnnnnnnnnnnnnnnnnnnnnnnnnnnnnnnnnnnnnnnnnnnnnnnnnnnnnnnnnnnnnnnnnnnnnnnnnnnnnnnnnnnnnnnnnnnnnnnnnnnnnnnnnnnnnnnnnnnnnnnnnnnnnnnnnnnnnnnnnnnnnnnnnnnnnnnnnnnnnnnnnnnnnnnnnnnnnnnnnnnnnnnnnnnnnnnnnnnnnnnnnnnnnnnnnnnnnnnnnnnnnnnnnnnnnnnnnnnnnnnnnnnnnnnnnnnnnnnnnnnnnnnnnnnnnnnnnnnnnnnnnnnnnnnnnnnnnnnnnnnnnnnnnnnnnnnnnnnnnnnnnnnnnnnnnnnnnnnnnnnnnnnnnnnnnnnnnnnnnnnnnnnnnnnnnnnnnnnnnnnnnnnnnnnnnnnnnnnnnnnnnnnnnnnnnnnnnnnnnnnnnnnnnnnnnnnnnnnnnnnnnnnnnnnnnnnnnnnnnnnnnnnnnnnnnnnnnnnnnnnnnnnnnnnnnnnnnnnnnnnnnnnnnnnnnnnnnnnnnnnnnnnnnnnnnnnnnnnnnnnnnnnnnnnnnnnnnnnnnnnnnnnnnnnnnnnnnnnnnnnnnnnnnnnnnnnnnnnnnnnnnnnnnnnnnnnnnnnnnnnnnnnnnnnnnnnnnnnnnnnnnnnnnnnnnnnnnnnnnnnnnnnnnnnnnnnnnnnnnnnnnnnnnnnnnnnnnnnnnnnnnnnnnnnnnnnnnnnnnnnnnnnnnnnnnnnnnnnnnnnnnnnnnnnnnnnnnnnnnnnnnnnnnnnnnnnnnnnnnnnnnnnnnnnnnnnnnnnnnnnnnnnnnnnnnnnnnnnnnnnnnnnnnnnnnnnnnnnnnnnnnnnnnnnnnnnnnnnnnnnnnnnnnnnnnnnnnnnnnnnnnnnnnnnnnnnnnnnnnnnnnnnnnnnnnnnnnnnnnnnnnnnnnnnnnnnnnnnnnnnnnnnnnnnnnnnnnnnnnnnnnnnnnnnnnnnnnnnnnnnnnnnnnnnnnnnnnnnnnnnnnnnnnnnnnnnnnnnnnnnnnnnnnnnnnnnnnnnnnnnnnnnnnnnnnnnnnnnnnnnnnnnnnnnnnnnnnnnnnnnnnnnnnnnnnnnnnnnnnnnnnnnnnnnnnnnnnnnnnnnnnnnnnnnnnnnnnnnnnnnnnnnnnnnnnnnnnnnnnnnnnnnnnnnnnnnnnnnnnnnnnnnnnnnnnnnnnnnnnnnnnnnnnnnnnnnnnnnnnnnnnnnnnnnnnnnnnnnnnnnnnnnnnnnnnnnnnnnnnnnnnnnnnnnnnnnnnnnnnnnnnnnnnnnnnnnnnnnnnnnnnnnnnnnnnnnnnnnnnnnnnnnnnnnnnnnnnnnnnnnnnnnnnnnnnnnnnnnnnnnnnnnnnnnnnnnnnnnnnnnnnnnnnnnnnnnnnnnnnnnnnnnnnnnnnnnnnnnnnnnnnnnnnnnnnnnnnnnnnnnnnnnnnnnnnnnnnnnnnnnnnnnnnnnnnnnnnnnnnnnnnnnnnnnnnnnnnnnnnnnnnnnnnnnnnnnnnnnnnnnnnnnnnnnnnnnnnnnnnnnnnnnnnnnnnnnnnnnnnnnnnnnnnnnnnnnnnnnnnnnnnnnnnnnnnnnnnnnnnnnnnnnnnnnnnnnnnnnnnnnnnnnnnnnnnnnnnnnnnnnnnnnnnnnnnnnnnnnnnnnnnnnnnnnnnnnnnnnnnnnnnnnnnnnnnnnnnnnnnnnnnnnnnnnnnnnnnnnnnnnnnnnnnnnnnnnnnnnnnnnnnnnnnnnnnnnnnnnnnnnnnnnnnnnnnnnnnnnnnnnnnnnnnnnnnnnnnnnnnnnnnnnnnnnnnnnnnnnnnnnnnnnnnnnnnnnnnnnnnnnnnnnnnnnnnnnnnnnnnnnnnnnnnnnnnnnnnnnnnnnnnnnnnnnnnnnnnnnnnnnnnnnnnnnnnnnnnnnnnnnnnnnnnnnnnnnnnnnnnnnnnnnnnnnnnnnnnnnnnnnnnnnnnnnnnnnnnnnnnnnnnnnnnnnnnnnnnnnnnnnnnnnnnnnnnnnnnnnnnnnnnnnnnnnnnnnnnnnnnnnnnnnnnnnnnnnnnnnnnnnnnnnnnnnnnnnnnnnnnnnnnnnnnnnnnnnnnnnnnnnnnnnnnnnnnnnnnnnnnnnnnnnnnnnnnnnnnnnnnnnnnnnnnnnnnnnnnnnnnnnnnnnnnnnnnnnnnnnnnnnnnnnnnnnnnnnnnnnnnnnnnnnnnnnnnnnnnnnnnnnnnnnnnnnnnnnnnnnnnnnnnnnnnnnnnnnnnnnnnnnnnnnnnnnnnnnnnnnnnnnnnnnnnnnnnnnnnnnnnnnnnnnnnnnnnnnnnnnnnnnnnnnnnnnnnnnnnnnnnnnnnnnnnnnnnnnnnnnnnnnnnnnnnnnnnnnnnnnnnnnnnnnnnnnnnnnnnnnnnnnnnnnnnnnnnnnnnnnnnnnnnnnnnnnnnnnnnnnnnnnnnnnnnnnnnnnnnnnnnnnnnnnnnnnnnnnnnnnnnnnnnnnnnnnnnnnnnnnnnnnnnnnnnnnnnnnnnnnnnnnnnnnnnnnnnnnnnnnnnnnnnnnnnnnnnnnnnnnnnnnnnnnnnnnnnnnnnnnnnnnnnnnnnnnnnnnnnnnnnnnnnnnnnnnnnnnnnnnnnnnnnnnnnnnnnnnnnnnnnnnnnnnnnnnnnnnnnnnnnnnnnnnnnnnnnnnnnnnnnnnnnnnnnnnnnnnnnnnnnnnnnnnnnnnnnnnnnnnnnnnnnnnnnnnnnnnnnnnnnnnnnnnnnnnnnnnnnnnnnnnnnnnnnnnnnnnnnnnnnnnnnnnnnnnnnnnnnnnnnnnnnnnnnnnnnnnnnnnnnnnnnnnnnnnnnnnnnnnnnnnnnnnnnnnnnnnnnnnnnnnnnnnnnnnnnnnnnnnnnnnnnnnnnnnnnnnnnnnnnnnnnnnnnnnnnnnnnnnnnnnnnnnnnnnnnnnnnnnnnnnnnnnnnnnnnnnnnnnnnnnnnnnnnnnnnnnnnnnnnnnnnnnnnnnnnnnnnnnnnnnnnnnnnnnnnnnnnnnnnnnnnnnnnnnnnnnnnnnnnnnnnnnnnnnnnnnnnnnnnnnnnnnnnnnnnnnnnnnnnnnnnnnnnnnnnnnnnnnnnnnnnnnnnnnnnnnnnnnnnnnnnnnnnnnnnnnnnnnnnnnnnnnnnnnnnnnnnnnnnnnnnnnnnnnnnnnnnnnnnnnnnnnnnnnnnnnnnnnnnnnnnnnnnnnnnnnnnnnnnnnnnnnnnnnnnnnnnnnnnnnnnnnnnnnnnnnnnnnnnnnnnnnnnnnnnnnnnnnnnnnnnnnnnnnnnnnnnnnnnnnnnnnnnnnnnnnnnnnnnnnnnnnnnnnnnnnnnnnnnnnnnnnnnnnnnnnnnnnnnnnnnnnnnnnnnnnnnnnnnnnnnnnnnnnnnnnnnnnnnnnnnnnnnnnnnnnnnnnnnnnnnnnnnnnnnnnnnnnnnnnnnnnnnnnnnnnnnnnnnnnnnnnnnnnnnnnnnnnnnnnnnnnnnnnnnnnnnnnnnnnnnnnnnnnnnnnnnnnnnnnnnnnnnnnnnnnnnnnnnnnnnnnnnnnnnnnnnnnnnnnnnnnnnnnnnnnnnnnnnnnnnnnnnnnnnnnnnnnnnnnnnnnnnnnnnnnnnnnnnnnnnnnnnnnnnnnnnnnnnnnnnnnnnnnnnnnnnnnnnnnnnnnnnnnnnnnnnnnnnnnnnnnnnnnnnnnnnnnnnnnnnnnnnnnnnnnnnnnnnnnnnnnnnnnnnnnnnnnnnnnnnnnnnnnnnnnnnnnnnnnnnnnnnnnnnnnnnnnnnnnnnnnnnnnnnnnnnnnnnnnnnnnnnnnnnnnnnnnnnnnnnnnnnnnnnnnnnnnnnnnnnnnnnnnnnnnnnnnnnnnnnnnnnnnnnnnnnnnnnnnnnnnnnnnnnnnnnnnnnnnnnnnnnnnnnnnnnnnnnnnnnnnnnnnnnnnnnnnnnnnnnnnnnnnnnnnnnnnnnnnnnnnnnnnnnnnnnnnnnnnnnnnnnnnnnnnnnnnnnnnnnnnnnnnnnnnnnnnnnnnnnnnnnnnnnnnnnnnnnnnnnnnnnnnnnnnnnnnnnnnnnnnnnnnnnnnnnnnnnnnnnnnnnnnnnnnnnnnnnnnnnnnnnnnnnnnnnnnnnnnnnnnnnnnnnnnnnnnnnnnnnnnnnnnnnnnnnnnnnnnnnnnnnnnnnnnnnnnnnnnnnnnnnnnnnnnnnnnnnnnnnnnnnnnnnnnnnnnnnnnnnnnnnnnnnnnnnnnnnnnnnnnnnnnnnnnnnnnnnnnnnnnnnnnnnnnnnnnnnnnnnnnnnnnnnnnnnnnnnnnnnnnnnnnnnnnnnnnnnnnnnnnnnnnnnnnnnnnnnnnnnnnnnnnnnnnnnnnnnnnnnnnnnnnnnnnnnnnnnnnnnnnnnnnnnnnnnnnnnnnnnnnnnnnnnnnnnnnnnnnnnnnnnnnnnnnnnnnnnnnnnnnnnnnnnnnnnnnnnnnnnnnnnnnnnnnnnnnnnnnnnnnnnnnnnnnnnnnnnnnnnnnnnnnnnnnnnnnnnnnnnnnnnnnnnnnnnnnnnnnnnnnnnnnnnnnnnnnnnnnnnnnnnnnnnnnnnnnnnnnnnnnnnnnnnnnnnnnnnnnnnnnnnnnnnnnnnnnnnnnnnnnnnnnnnnnnnnnnnnnnnnnnnnnnnnnnnnnnnnnnnnnnnnnnnnnnnnnnnnnnnnnnnnnnnnnnnnnnnnnnnnnnnnnnnnnnnnnnnnnnnnnnnnnnnnnnnnnnnnnnnnnnnnnnnnnnnnnnnnnnnnnnnnnnnnnnnnnnnnnnnnnnnnnnnnnnnnnnnnnnnnnnnnnnnnnnnnnnnnnnnnnnnnnnnnnnnnnnnnnnnnnnnnnnnnnnnnnnnnnnnnnnnnnnnnnnnnnnnnnnnnnnnnnnnnnnnnnnnnnnnnnnnnnnnnnnnnnnnnnnnnnnnnnnnnnnnnnnnnnnnnnnnnnnnnnnnnnnnnnnnnnnnnnnnnnnnnnnnnnnnnnnnnnnnnnnnnnnnnnnnnnnnnnnnnnnnnnnnnnnnnnnnnnnnnnnnnnnnnnnnnnnnnnnnnnnnnnnnnnnnnnnnnnnnnnnnnnnnnnnnnnnnnnnnnnnnnnnnnnnnnnnnnnnnnnnnnnnnnnnnnnnnnnnnnnnnnnnnnnnnnnnnnnnnnnnnnnnnnnnnnnnnnnnnnnnnnnnnnnnnnnnnnnnnnnnnnnnnnnnnnnnnnnnnnnnnnnnnnnnnnnnnnnnnnnnnnnnnnnnnnnnnnnnnnnnnnnnnnnnnnnnnnnnnnnnnnnnnnnnnnnnnnnnnnnnnnnnnnnnnnnnnnnnnnnnnnnnnnnnnnnnnnnnnnnnnnnnnnnnnnnnnnnnnnnnnnnnnnnnnnnnnnnnnnnnnnnnnnnnnnnnnnnnnnnnnnnnnnnnnnnnnnnnnnnnnnnnnnnnnnnnnnnnnnnnnnnnnnnnnnnnnnnnnnnnnnnnnnnnnnnnnnnnnnnnnnnnnnnnnnnnnnnnnnnnnnnnnnnnnnnnnnnnnnnnnnnnnnnnnnnnnnnnnnnnnnnnnnnnnnnnnnnnnnnnnnnnnnnnnnnnnnnnnnnnnnnnnnnnnnnnnnnnnnnnnnnnnnnnnnnnnnnnnnnnnnnnnnnnnnnnnnnnnnnnnnnnnnnnnnnnnnnnnnnnnnnnnnnnnnnnnnnnnnnnnnnnnnnnnnnnnnnnnnnnnnnnnnnnnnnnnnnnnnnnnnnnnnnnnnnnnnnnnnnnnnnnnnnnnnnnnnnnnnnnnnnnnnnnnnnnnnnnnnnnnnnnnnnnnnnnnnnnnnnnnnnnnnnnnnnnnnnnnnnnnnnnnnnnnnnnnnnnnnnnnnnnnnnnnnnnnnnnnnnnnnnnnnnnnnnnnnnnnnnnnnnnnnnnnnnnnnnnnnnnnnnnnnnnnnnnnnnnnnnnnnnnnnnnnnnnnnnnnnnnnnnnnnnnnnnnnnnnnnnnnnnnnnnnnnnnnnnnnnnnnnnnnnnnnnnnnnnnnnnnnnnnnnnnnnnnnnnnnnnnnnnnnnnnnnnnnnnnnnnnnnnnnnnnnnnnnnnnnnnnnnnnnnnnnnnnnnnnnnnnnnnnnnnnnnnnnnnnnnnnnnnnnnnnnnnnnnnnnnnnnnnnnnnnnnnnnnnnnnnnnnnnnnnnnnnnnnnnnnnnnnnnnnnnnnnnnnnnnnnnnnnnnnnnnnnnnnnnnnnnnnnnnnnnnnnnnnnnnnnnnnnnnnnnnnnnnnnnnnnnnnnnnnnnnnnnnnnnnnnnnnnnnnnnnnnnnnnnnnnnnnnnnnnnnnnnnnnnnnnnnnnnnnnnnnnnnnnnnnnnnnnnnnnnnnnnnnnnnnnnnnnnnnnnnnnnnnnnnnnnnnnnnnnnnnnnnnnnnnnnnnnnnnnnnnnnnnnnnnnnnnnnnnnnnnnnnnnnnnnnnnnnnnnnnnnnnnnnnnnnnnnnnnnnnnnnnnnnnnnnnnnnnnnnnnnnnnnnnnnnnnnnnnnnnnnnnnnnnnnnnnnnnnnnnnnnnnnnnnnnnnnnnnnnnnnnnnnnnnnnnnnnnnnnnnnnnnnnnnnnnnnnnnnnnnnnnnnnnnnnnnnnnnnnnnnnnnnnnnnnnnnnnnnnnnnnnnnnnnnnnnnnnnnnnnnnnnnnnnnnnnnnnnnnnnnnnnnnnnnnnnnnnnnnnnnnnnnnnnnnnnnnnnnnnnnnnnnnnnnnnnnnnnnnnnnnnnnnnnnnnnnnnnnnnnnnnnnnnnnnnnnnnnnnnnnnnnnnnnnnnnnnnnnnnnnnnnnnnnnnnnnnnnnnnnnnnnnnnnnnnnnnnnnnnnnnnnnnnnnnnnnnnnnnnnnnnnnnnnnnnnnnnnnnnnnnnnnnnnnnnnnnnnnnnnnnnnnnnnnnnnnnnnnnnnnnnnnnnnnnnnnnnnnnnnnnnnnnnnnnnnnnnnnnnnnnnnnnnnnnnnnnnnnnnnnnnnnnnnnnnnnnnnnnnnnnnnnnnnnnnnnnnnnnnnnnnnnnnnnnnnnnnnnnnnnnnnnnnnnnnnnnnnnnnnnnnnnnnnnnnnnnnnnnnnnnnnnnnnnnnnnnnnnnnnnnnnnnnnnnnnnnnnnnnnnnnnnnnnnnnnnnnnnnnnnnnnnnnnnnnnnnnnnnnnnnnnnnnnnnnnnnnnnnnnnnnnnnnnnnnnnnnnnnnnnnnnnnnnnnnnnnnnnnnnnnnnnnnnnnnnnnnnnnnnnnnnnnnnnnnnnnnnnnnnnnnnnnnnnnnnnnnnnnnnnnnnnnnnnnnnnnnnnnnnnnnnnnnnnnnnnnnnnnnnnnnnnnnnnnnnnnnnnnnnnnnnnnnnnnnnnnnnnnnnnnnnnnnnnnnnnnnnnnnnnnnnnnnnnnnnnnnnnnnnnnnnnnnnnnnnnnnnnnnnnnnnnnnnnnnnnnnnnnnnnnnnnnnnnnnnnnnnnnnnnnnnnnnnnnnnnnnnnnnnnnnnnnnnnnnnnnnnnnnnnnnnnnnnnnnnnnnnnnnnnnnnnnnnnnnnnnnnnnnnnnnnnnnnnnnnnnnnnnnnnnnnnnnnnnnnnnnnnnnnnnnnnnnnnnnnnnnnnnnnnnnnnnnnnnnnnnnnnnnnnnnnnnnnnnnnnnnnnnnnnnnnnnnnnnnnnnnnnnnnnnnnnnnnnnnnnnnnnnnnnnnnnnnnnnnnnnnnnnnnnnnnnnnnnnnnnnnnnnnnnnnnnnnnnnnnnnnnnnnnnnnnnnnnnnnnnnnnnnnnnnnnnnnnnnnnnnnnnnnnnnnnnnnnnnnnnnnnnnnnnnnnnnnnnnnnnnnnnnnnnnnnnnnnnnnnnnnnnnnnnnnnnnnnnnnnnnnnnnnnnnnnnnnnnnnnnnnnnnnnnnnnnnnnnnnnnnnnnnnnnnnnnnnnnnnnnnnnnnnnnnnnnnnnnnnnnnnnnnnnnnnnnnnnnnnnnnnnnnnnnnnnnnnnnnnnnnnnnnnnnnnnnnnnnnnnnnnnnnnnnnnnnnnnnnnnnnnnnnnnnnnnnnnnnnnnnnnnnnnnnnnnnnnnnnnnnnnnnnnnnnnnnnnnnnnnnnnnnnnnnnnnnnnnnnnnnnnnnnnnnnnnnnnnnnnnnnnnnnnnnnnnnnnnnnnnnnnnnnnnnnnnnnnnnnnnnnnnnnnnnnnnnnnnnnnnnnnnnnnnnnnnnnnnnnnnnnnnnnnnnnnnnnnnnnnnnnnnnnnnnnnnnnnnnnnnnnnnnnnnnnnnnnnnnnnnnnnnnnnnnnnnnnnnnnnnnnnnnnnnnnnnnnnnnnnnnnnnnnnnnnnnnnnnnnnnnnnnnnnnnnnnnnnnnnnnnnnnnnnnnnnnnnnnnnnnnnnnnnnnnnnnnnnnnnnnnnnnnnnnnnnnnnnnnnnnnnnnnnnnnnnnnnnnnnnnnnnnnnnnnnnnnnnnnnnnnnnnnnnnnnnnnnnnnnnnnnnnnnnnnnnnnnnnnnnnnnnnnnnnnnnnnnnnnnnnnnnnnnnnnnnnnnnnnnnnnnnnnnnnnnnnnnnnnnnnnnnnnnnnnnnnnnnnnnnnnnnnnnnnnnnnnnnnnnnnnnnnnnnnnnnnnnnnnnnnnnnnnnnnnnnnnnnnnnnnnnnnnnnnnnnnnnnnnnnnnnnnnnnnnnnnnnnnnnnnnnnnnnnnnnnnnnnnnnnnnnnnnnnnnnnnnnnnnnnnnnnnnnnnnnnnnnnnnnnnnnnnnnnnnnnnnnnnnnnnnnnnnnnnnnnnnnnnnnnnnnnnnnnnnnnnnnnnnnnnnnnnnnnnnnnnnnnnnnnnnnnnnnnnnnnnnnnnnnnnnnnnnnnnnnnnnnnnnnnnnnnnnnnnnnnnnnnnnnnnnnnnnnnnnnnnnnnnnnnnnnnnnnnnnnnnnnnnnnnnnnnnnnnnnnnnnnnnnnnnnnnnnnnnnnnnnnnnnnnnnnnnnnnnnnnnnnnnnnnnnnnnnnnnnnnnnnnnnnnnnnnnnnnnnnnnnnnnnnnnnnnnnnnnnnnnnnnnnnnnnnnnnnnnnnnnnnnnnnnnnnnnnnnnnnnnnnnnnnnnnnnnnnnnnnnnnnnnnnnnnnnnnnnnnnnnnnnnnnnnnnnnnnnnnnnnnnnnnnnnnnnnnnnnnnnnnnnnnnnnnnnnnnnnnnnnnnnnnnnnnnnnnnnnnnnnnnnnnnnnnnnnnnnnnnnnnnnnnnnnnnnnnnnnnnnnnnnnnnnnnnnnnnnnnnnnnnnnnnnnnnnnnnnnnnnnnnnnnnnnnnnnnnnnnnnnnnnnnnnnnnnnnnnnnnnnnnnnnnnnnnnnnnnnnnnnnnnnnnnnnnnnnnnnnnnnnnnnnnnnnnnnnnnnnnnnnnnnnnnnnnnnnnnnnnnnnnnnnnnnnnnnnnnnnnnnnnnnnnnnnnnnnnnnnnnnnnnnnnnnnnnnnnnnnnnnnnnnnnnnnnnnnnnnnnnnnnnnnnnnnnnnnnnnnnnnnnnnnnnnnnnnnnnnnnnnnnnnnnnnnnnnnnnnnnnnnnnnnnnnnnnnnnnnnnnnnnnnnnnnnnnnnnnnnnnnnnnnnnnnnnnnnnnnnnnnnnnnnnnnnnnnnnnnnnnnnnnnnnnnnnnnnnnnnnnnnnnnnnnnnnnnnnnnnnnnnnnnnnnnnnnnnnnnnnnnnnnnnnnnnnnnnnnnnnnnnnnnnnnnnnnnnnnnnnnnnnnnnnnnnnnnnnnnnnnnnnnnnnnnnnnnnnnnnnnnnnnnnnnnnnnnnnnnnnnnnnnnnnnnnnnnnnnnnnnnnnnnnnnnnnnnnnnnnnnnnnnnnnnnnnnnnnnnnnnnnnnnnnnnnnnnnnnnnnnnnnnnnnnnnnnnnnnnnnnnnnnnnnnnnnnnnnnnnnnnnnnnnnnnnnnnnnnnnnnnnnnnnnnnnnnnnnnnnnnnnnnnnnnnnnnnnnnnnnnnnnnnnnnnnnnnnnnnnnnnnnnnnnnnnnnnnnnnnnnnnnnnnnnnnnnnnnnnnnnnnnnnnnnnnnnnnnnnnnnnnnnnnnnnnnnnnnnnnnnnnnnnnnnnnnnnnnnnnnnnnnnnnnnnnnnnnnnnnnnnnnnnnnnnnnnnnnnnnnnnnnnnnnnnnnnnnnnnnnnnnnnnnnnnnnnnnnnnnnnnnnnnnnnnnnnnnnnnnnnnnnnnnnnnnnnnnnnnnnnnnnnnnnnnnnnnnnnnnnnnnnnnnnnnnnnnnnnnnnnnnnnnnnnnnnnnnnnnnnnnnnnnnnnnnnnnnnnnnnnnnnnnnnnnnnnnnnnnnnnnnnnnnnnnnnnnnnnnnnnnnnnnnnnnnnnnnnnnnnnnnnnnnnnnnnnnnnnnnnnnnnnnnnnnnnnnnnnnnnnnnnnnnnnnnnnnnnnnnnnnnnnnnnnnnnnnnnnnnnnnnnnnnnnnnnnnnnnnnnnnnnnnnnnnnnnnnnnnnnnnnnnnnnnnnnnnnnnnnnnnnnnnnnnnnnnnnnnnnnnnnnnnnnnnnnnnnnnnnnnnnnnnnnnnnnnnnnnnnnnnnnnnnnnnnnnnnnnnnnnnnnnnnnnnnnnnnnnnnnnnnnnnnnnnnnnnnnnnnnnnnnnnnnnnnnnnnnnnnnnnnnnnnnnnnnnnnnnnnnnnnnnnnnnnnnnnnnnnnnnnnnnnnnnnnnnnnnnnnnnnnnnnnnnnnnnnnnnnnnnnnnnnnnnnnnnnnnnnnnnnnnnnnnnnnnnnnnnnnnnnnnnnnnnnnnnnnnnnnnnnnnnnnnnnnnnnnnnnnnnnnnnnnnnnnnnnnnnnnnnnnnnnnnnnnnnnnnnnnnnnnnnnnnnnnnnnnnnnnnnnnnnnnnnnnnnnnnnnnnnnnnnnnnnnnnnnnnnnnnnnnnnnnnnnnnnnnnnnnnnnnnnnnnnnnnnnnnnnnnnnnnnnnnnnnnnnnnnnnnnnnnnnnnnnnnnnnnnnnnnnnnnnnnnnnnnnnnnnnnnnnnnnnnnnnnnnnnnnnnnnnnnnnnnnnnnnnnnnnnnnnnnnnnnnnnnnnnnnnnnnnnnnnnnnnnnnnnnnnnnnnnnnnnnnnnnnnnnnnnnnnnnnnnnnnnnnnnnnnnnnnnnnnnnnnnnnnnnnnnnnnnnnnnnnnnnnnnnnnnnnnnnnnnnnnnnnnnnnnnnnnnnnnnnnnnnnnnnnnnnnnnnnnnnnnnnnnnnnnnnnnnnnnnnnnnnnnnnnnnnnnnnnnnnnnnnnnnnnnnnnnnnnnnnnnnnnnnnnnnnnnnnnnnnnnnnnnnnnnnnnnnnnnnnnnnnnnnnnnnnnnnnnnnnnnnnnnnnnnnnnnnnnnnnnnnnnnnnnnnnnnnnnnnnnnnnnnnnnnnnnnnnnnnnnnnnnnnnnnnnnnnnnnnnnnnnnnnnnnnnnnnnnnnnnnnnnnnnnnnnnnnnnnnnnnnnnnnnnnnnnnnnnnnnnnnnnnnnnnnnnnnnnnnnnnnnnnnnnnnnnnnnnnnnnnnnnnnnnnnnnnnnnnnnnnnnnnnnnnnnnnnnnnnnnnnnnnnnnnnnnnnnnnnnnnnnnnnnnnnnnnnnnnnnnnnnnnnnnnnnnnnnnnnnnnnnnnnnnnnnnnnnnnnnnnnnnnnnnnnnnnnnnnnnnnnnnnnnnnnnnnnnnnnnnnnnnnnnnnnnnnnnnnnnnnnnnnnnnnnnnnnnnnnnnnnnnnnnnnnnnnnnnnnnnnnnnnnnnnnnnnnnnnnnnnnnnnnnnnnnnnnnnnnnnnnnnnnnnnnnnnnnnnnnnnnnnnnnnnnnnnnnnnnnnnnnnnnnnnnnnnnnnnnnnnnnnnnnnnnnnnnnnnnnnnnnnnnnnnnnnnnnnnnnnnnnnnnnnnnnnnnnnnnnnnnnnnnnnnnnnnnnnnnnnnnnnnnnnnnnnnnnnnnnnnnnnnnnnnnnnnnnnnnnnnnnnnnnnnnnnnnnnnnnnnnnnnnnnnnnnnnnnnnnnnnnnnnnnnnnnnnnnnnnnnnnnnnnnnnnnnnnnnnnnnnnnnnnnnnnnnnnnnnnnnnnnnnnnnnnnnnnnnnnnnnnnnnnnnnnnnnnnnnnnnnnnnnnnnnnnnnnnnnnnnnnnnnnnnnnnnnnnnnnnnnnnnnnnnnnnnnnnnnnnnnnnnnnnnnnnnnnnnnnnnnnnnnnnnnnnnnnnnnnnnnnnnnnnnnnnnnnnnnnnnnnnnnnnnnnnnnnnnnnnnnnnnnnnnnnnnnnnnnnnnnnnnnnnnnnnnnnnnnnnnnnnnnnnnnnnnnnnnnnnnnnnnnnnnnnnnnnnnnnnnnnnnnnnnnnnnnnnnnnnnnnnnnnnnnnnnnnnnnnnnnnnnnnnnnnnnnnnnnnnnnnnnnnnnnnnnnnnnnnnnnnnnnnnnnnnnnnnnnnnnnnnnnnnnnnnnnnnnnnnnnnnnnnnnnnnnnnnnnnnnnnnnnnnnnnnnnnnnnnnnnnnnnnnnnnnnnnnnnnnnnnnnnnnnnnnnnnnnnnnnnnnnnnnnnnnnnnnnnnnnnnnnnnnnnnnnnnnnnnnnnnnnnnnnnnnnnnnnnnnnnnnnnnnnnnnnnnnnnnnnnnnnnnnnnnnnnnnnnnnnnnnnnnnnnnnnnnnnnnnnnnnnnnnnnnnnnnnnnnnnnnnnnnnnnnnnnnnnnnnnnnnnnnnnnnnnnnnnnnnnnnnnnnnnnnnnnnnnnnnnnnnnnnnnnnnnnnnnnnnnnnnnnnnnnnnnnnnnnnnnnnnnnnnnnnnnnnnnnnnnnnnnnnnnnnnnnnnnnnnnnnnnnnnnnnnnnnnnnnnnnnnnnnnnnnnnnnnnnnnnnnnnnnnnnnnnnnnnnnnnnnnnnnnnnnnnnnnnnnnnnnnnnnnnnnnnnnnnnnnnnnnnnnnnnnnnnnnnnnnnnnnnnnnnnnnnnnnnnnnnnnnnnnnnnnnnnnnnnnnnnnnnnnnnnnnnnnnnnnnnnnnnnnnnnnnnnnnnnnnnnnnnnnnnnnnnnnnnnnnnnnnnnnnnnnnnnnnnnnnnnnnnnnnnnnnnnnnnnnnnnnnnnnnnnnnnnnnnnnnnnnnnnnnnnnnnnnnnnnnnnnnnnnnnnnnnnnnnnnnnnnnnnnnnnnnnnnnnnnnnnnnnnnnnnnnnnnnnnnnnnnnnnnnnnnnnnnnnnnnnnnnnnnnnnnnnnnnnnnnnnnnnnnnnnnnnnnnnnnnnnnnnnnnnnnnnnnnnnnnnnnnnnnnnnnnnnnnnnnnnnnnnnnnnnnnnnnnnnnnnnnnnnnnnnnnnnnnnnnnnnnnnnnnnnnnnnnnnnnnnnnnnnnnnnnnnnnnnnnnnnnnnnnnnnnnnnnnnnnnnnnnnnnnnnnnnnnnnnnnnnnnnnnnnnnnnnnnnnnnnnnnnnnnnnnnnnnnnnnnnnnnnnnnnnnnnnnnnnnnnnnnnnnnnnnnnnnnnnnnnnnnnnnnnnnnnnnnnnnnnnnnnnnnnnnnnnnnnnnnnnnnnnnnnnnnnnnnnnnnnnnnnnnnnnnnnnnnnnnnnnnnnnnnnnnnnnnnnnnnnnnnnnnnnnnnnnnnnnnnnnnnnnnnnnnnnnnnnnnnnnnnnnnnnnnnnnnnnnnnnnnnnnnnnnnnnnnnnnnnnnnnnnnnnnnnnnnnnnnnnnnnnnnnnnnnnnnnnnnnnnnnnnnnnnnnnnnnnnnnnnnnnnnnnnnnnnnnnnnnnnnnnnnnnnnnnnnnnnnnnnnnnnnnnnnnnnnnnnnnnnnnnnnnnnnnnnnnnnnnnnnnnnnnnnnnnnnnnnnnnnnnnnnnnnnnnnnnnnnnnnnnnnnnnnnnnnnnnnnnnnnnnnnnnnnnnnnnnnnnnnnnnnnnnnnnnnnnnnnnnnnnnnnnnnnnnnnnnnnnnnnnnnnnnnnnnnnnnnnnnnnnnnnnnnnnnnnnnnnnnnnnnnnnnnnnnnnnnnnnnnnnnnnnnnnnnnnnnnnnnnnnnnnnnnnnnnnnnnnnnnnnnnnnnnnnnnnnnnnnnnnnnnnnnnnnnnnnnnnnnnnnnnnnnnnnnnnnnnnnnnnnnnnnnnnnnnnnnnnnnnnnnnnnnnnnnnnnnnnnnnnnnnnnnnnnnnnnnnnnnnnnnnnnnnnnnnnnnnnnnnnnnnnnnnnnnnnnnnnnnnnnnnnnnnnnnnnnnnnnnnnnnnnnnnnnnnnnnnnnnnnnnnnnnnnnnnnnnnnnnnnnnnnnnnnnnnnnnnnnnnnnnnnnnnnnnnnnnnnnnnnnnnnnnnnnnnnnnnnnnnnnnnnnnnnnnnnnnnnnnnnnnnnnnnnnnnnnnnnnnnnnnnnnnnnnnnnnnnnnnnnnnnnnnnnnnnnnnnnnnnnnnnnnnnnnnnnnnnnnnnnnnnnnnnnnnnnnnnnnnnnnnnnnnnnnnnnnnnnnnnnnnnnnnnnnnnnnnnnnnnnnnnnnnnnnnnnnnnnnnnnnnnnnnnnnnnnnnnnnnnnnnnnnnnnnnnnnnnnnnnnnnnnnnnnnnnnnnnnnnnnnnnnnnnnnnnnnnnnnnnnnnnnnnnnnnnnnnnnnnnnnnnnnnnnnnnnnnnnnnnnnnnnnnnnnnnnnnnnnnnnnnnnnnnnnnnnnnnnnnnnnnnnnnnnnnnnnnnnnnnnnnnnnnnnnnnnnnnnnnnnnnnnnnnnnnnnnnnnnnnnnnnnnnnnnnnnnnnnnnnnnnnnnnnnnnnnnnnnnnnnnnnnnnnnnnnnnnnnnnnnnnnnnnnnnnnnnnnnnnnnnnnnnnnnnnnnnnnnnnnnnnnnnnnnnnnnnnnnnnnnnnnnnnnnnnnnnnnnnnnnnnnnnnnnnnnnnnnnnnnnnnnnnnnnnnnnnnnnnnnnnnnnnnnnnnnnnnnnnnnnnnnnnnnnnnnnnnnnnnnnnnnnnnnnnnnnnnnnnnnnnnnnnnnnnnnnnnnnnnnnnnnnnnnnnnnnnnnnnnnnnnnnnnnnnnnnnnnnnnnnnnnnnnnnnnnnnnnnnnnnnnnnnnnnnnnnnnnnnnnnnnnnnnnnnnnnnnnnnnnnnnnnnnnnnnnnnnnnnnnnnnnnnnnnnnnnnnnnnnnnnnnnnnnnnnnnnnnnnnnnnnnnnnnnnnnnnnnnnnnnnnnnnnnnnnnnnnnnnnnnnnnnnnnnnnnnnnnnnnnnnnnnnnnnnnnnnnnnnnnnnnnnnnnnnnnnnnnnnnnnnnnnnnnnnnnnnnnnnnnnnnnnnnnnnnnnnnnnnnnnnnnnnnnnnnnnnnnnnnnnnnnnnnnnnnnnnnnnnnnnnnnnnnnnnnnnnnnnnnnnnnnnnnnnnnnnnnnnnnnnnnnnnnnnnnnnnnnnnnnnnnnnnnnnnnnnnnnnnnnnnnnnnnnnnnnnnnnnnnnnnnnnnnnnnnnnnnnnnnnnnnnnnnnnnnnnnnnnnnnnnnnnnnnnnnnnnnnnnnnnnnnnnnnnnnnnnnnnnnnnnnnnnnnnnnnnnnnnnnnnnnnnnnnnnnnnnnnnnnnnnnnnnnnnnnnnnnnnnnnnnnnnnnnnnnnnnnnnnnnnnnnnnnnnnnnnnnnnnnnnnnnnnnnnnnnnnnnnnnnnnnnnnnnnnnnnnnnnnnnnnnnnnnnnnnnnnnnnnnnnnnnnnnnnnnnnnnnnnnnnnnnnnnnnnnnnnnnnnnnnnnnnnnnnnnnnnnnnnnnnnnnnnnnnnnnnnnnnnnnnnnnnnnnnnnnnnnnnnnnnnnnnnnnnnnnnnnnnnnnnnnnnnnnnnnnnnnnnnnnnnnnnnnnnnnnnnnnnnnnnnnnnnnnnnnnnnnnnnnnnnnnnnnnnnnnnnnnnnnnnnnnnnnnnnnnnnnnnnnnnnnnnnnnnnnnnnnnnnnnnnnnnnnnnnnnnnnnnnnnnnnnnnnnnnnnnnnnnnnnnnnnnnnnnnnnnnnnnnnnnnnnnnnnnnnnnnnnnnnnnnnnnnnnnnnnnnnnnnnnnnnnnnnnnnnnnnnnnnnnnnnnnnnnnnnnnnnnnnnnnnnnnnnnnnnnnnnnnnnnnnnnnnnnnnnnnnnnnnnnnnnnnnnnnnnnnnnnnnnnnnnnnnnnnnnnnnnnnnnnnnnnnnnnnnnnnnnnnnnnnnnnnnnnnnnnnnnnnnnnnnnnnnnnnnnnnnnnnnnnnnnnnnnnnnnnnnnnnnnnnnnnnnnnnnnnnnnnnnnnnnnnnnnnnnnnnnnnnnnnnnnnnnnnnnnnnnnnnnnnnnnnnnnnnnnnnnnnnnnnnnnnnnnnnnnnnnnnnnnnnnnnnnnnnnnnnnnnnnnnnnnnnnnnnnnnnnnnnnnnnnnnnnnnnnnnnnnnnnnnnnnnnnnnnnnnnnnnnnnnnnnnnnnnnnnnnnnnnnnnnnnnnnnnnnnnnnnnnnnnnnnnnnnnnnnnnnnnnnnnnnnnnnnnnnnnnnnnnnnnnnnnnnnnnnnnnnnnnnnnnnnnnnnnnnnnnnnnnnnnnnnnnnnnnnnnnnnnnnnnnnnnnnnnnnnnnnnnnnnnnnnnnnnnnnnnnnnnnnnnnnnnnnnnnnnnnnnnnnnnnnnnnnnnnnnnnnnnnnnnnnnnnnnnnnnnnnnnnnnnnnnnnnnnnnnnnnnnnnnnnnnnnnnnnnnnnnnnnnnnnnnnnnnnnnnnnnnnnnnnnnnnnnnnnnnnnnnnnnnnnnnnnnnnnnnnnnnnnnnnnnnnnnnnnnnnnnnnnnnnnnnnnnnnnnnnnnnnnnnnnnnnnnnnnnnnnnnnnnnnnnnnnnnnnnnnnnnnnnnnnnnnnnnnnnnnnnnnnnnnnnnnnnnnnnnnnnnnnnnnnnnnnnnnnnnnnnnnnnnnnnnnnnnnnnnnnnnnnnnnnnnnnnnnnnnnnnnnnnnnnnnnnnnnnnnnnnnnnnnnnnnnnnnnnnnnnnnnnnnnnnnnnnnnnnnnnnnnnnnnnnnnnnnnnnnnnnnnnnnnnnnnnnnnnnnnnnnnnnnnnnnnnnnnnnnnnnnnnnnnnnnnnnnnnnnnnnnnnnnnnnnnnnnnnnnnnnnnnnnnnnnnnnnnnnnnnnnnnnnnnnnnnnnnnnnnnnnnnnnnnnnnnnnnnnnnnnnnnnnnnnnnnnnnnnnnnnnnnnnnnnnnnnnnnnnnnnnnnnnnnnnnnnnnnnnnnnnnnnnnnnnnnnnnnnnnnnnnnnnnnnnnnnnnnnnnnnnnnnnnnnnnnnnnnnnnnnnnnnnnnnnnnnnnnnnnnnnnnnnnnnnnnnnnnnnnnnnnnnnnnnnnnnnnnnnnnnnnnnnnnnnnnnnnnnnnnnnnnnnnnnnnnnnnnnnnnnnnnnnnnnnnnnnnnnnnnnnnnnnnnnnnnnnnnnnnnnnnnnnnnnnnnnnnnnnnnnnnnnnnnnnnnnnnnnnnnnnnnnnnnnnnnnnnnnnnnnnnnnnnnnnnnnnnnnnnnnnnnnnnnnnnnnnnnnnnnnnnnnnnnnnnnnnnnnnnnnnnnnnnnnnnnnnnnnnnnnnnnnnnnnnnnnnnnnnnnnnnnnnnnnnnnnnnnnnnnnnnnnnnnnnnnnnnnnnnnnnnnnnnnnnnnnnnnnnnnnnnnnnnnnnnnnnnnnnnnnnnnnnnnnnnnnnnnnnnnnnnnnnnnnnnnnnnnnnnnnnnnnnnnnnnnnnnnnnnnnnnnnnnnnnnnnnnnnnnnnnnnnnnnnnnnnnnnnnnnnnnnnnnnnnnnnnnnnnnnnnnnnnnnnnnnnnnnnnnnnnnnnnnnnnnnnnnnnnnnnnnnnnnnnnnnnnnnnnnnnnnnnnnnnnnnnnnnnnnnnnnnnnnnnnnnnnnnnnnnnnnnnnnnnnnnnnnnnnnnnnnnnnnnnnnnnnnnnnnnnnnnnnnnnnnnnnnnnnnnnnnnnnnnnnnnnnnnnnnnnnnnnnnnnnnnnnnnnnnnnnnnnnnnnnnnnnnnnnnnnnnnnnnnnnnnnnnnnnnnnnnnnnnnnnnnnnnnnnnnnnnnnnnnnnnnnnnnnnnnnnnnnnnnnnnnnnnnnnnnnnnnnnnnnnnnnnnnnnnnnnnnnnnnnnnnnnnnnnnnnnnnnnnnnnnnnnnnnnnnnnnnnnnnnnnnnnnnnnnnnnnnnnnnnnnnnnnnnnnnnnnnnnnnnnnnnnnnnnnnnnnnnnnnnnnnnnnnnnnnnnnnnnnnnnnnnnnnnnnnnnnnnnnnnnnnnnnnnnnnnnnnnnnnnnnnnnnnnnnnnnnnnnnnnnnnnnnnnnnnnnnnnnnnnnnnnnnnnnnnnnnnnnnnnnnnnnnnnnnnnnnnnnnnnnnnnnnnnnnnnnnnnnnnnnnnnnnnnnnnnnnnnnnnnnnnnnnnnnnnnnnnnnnnnnnnnnnnnnnnnnnnnnnnnnnnnnnnnnnnnnnnnnnnnnnnnnnnnnnnnnnnnnnnnnnnnnnnnnnnnnnnnnnnnnnnnnnnnnnnnnnnnnnnnnnnnnnnnnnnnnnnnnnnnnnnnnnnnnnnnnnnnnnnnnnnnnnnnnnnnnnnnnnnnnnnnnnnnnnnnnnnnnnnnnnnnnnnnnnnnnnnnnnnnnnnnnnnnnnnnnnnnnnnnnnnnnnnnnnnnnnnnnnnnnnnnnnnnnnnnnnnnnnnnnnnnnnnnnnnnnnnnnnnnnnnnnnnnnnnnnnnnnnnnnnnnnnnnnnnnnnnnnnnnnnnnnnnnnnnnnnnnnnnnnnnnnnnnnnnnnnnnnnnnnnnnnnnnnnnnnnnnnnnnnnnnnnnnnnnnnnnnnnnnnnnnnnnnnnnnnnnnnnnnnnnnnnnnnnnnnnnnnnnnnnnnnnnnnnnnnnnnnnnnnnnnnnnnnnnnnnnnnnnnnnnnnnnnnnnnnnnnnnnnnnnnnnnnnnnnnnnnnnnnnnnnnnnnnnnnnnnnnnnnnnnnnnnnnnnnnnnnnnnnnnnnnnnnnnnnnnnnnnnnnnnnnnnnnnnnnnnnnnnnnnnnnnnnnnnnnnnnnnnnnnnnnnnnnnnnnnnnnnnnnnnnnnnnnnnnnnnnnnnnnnnnnnnnnnnnnnnnnnnnnnnnnnnnnnnnnnnnnnnnnnnnnnnnnnnnnnnnnnnnnnnnnnnnnnnnnnnnnnnnnnnnnnnnnnnnnnnnnnnnnnnnnnnnnnnnnnnnnnnnnnnnnnnnnnnnnnnnnnnnnnnnnnnnnnnnnnnnnnnnnnnnnnnnnnnnnnnnnnnnnnnnnnnnnnnnnnnnnnnnnnnnnnnnnnnnnnnnnnnnnnnnnnnnnnnnnnnnnnnnnnnnnnnnnnnnnnnnnnnnnnnnnnnnnnnnnnnnnnnnnnnnnnnnnnnnnnnnnnnnnnnnnnnnnnnnnnnnnnnnnnnnnnnnnnnnnnnnnnnnnnnnnnnnnnnnnnnnnnnnnnnnnnnnnnnnnnnnnnnnnnnnnnnnnnnnnnnnnnnnnnnnnnnnnnnnnnnnnnnnnnnnnnnnnnnnnnnnnnnnnnnnnnnnnnnnnnnnnnnnnnnnnnnnnnnnnnnnnnnnnnnnnnnnnnnnnnnnnnnnnnnnnnnnnnnnnnnnnnnnnnnnnnnnnnnnnnnnnnnnnnnnnnnnnnnnnnnnnnnnnnnnnnnnnnnnnnnnnnnnnnnnnnnnnnnnnnnnnnnnnnnnnnnnnnnnnnnnnnnnnnnnnnnnnnnnnnnnnnnnnnnnnnnnnnnnnnnnnnnnnnnnnnnnnnnnnnnnnnnnnnnnnnnnnnnnnnnnnnnnnnnnnnnnnnnnnnnnnnnnnnnnnnnnnnnnnnnnnnnnnnnnnnnnnnnnnnnnnnnnnnnnnnnnnnnnnnnnnnnnnnnnnnnnnnnnnnnnnnnnnnnnnnnnnnnnnnnnnnnnnnnnnnnnnnnnnnnnnnnnnnnnnnnnnnnnnnnnnnnnnnnnnnnnnnnnnnnnnnnnnnnnnnnnnnnnnnnnnnnnnnnnnnnnnnnnnnnnnnnnnnnnnnnnnnnnnnnnnnnnnnnnnnnnnnnnnnnnnnnnnnnnnnnnnnnnnnnnnnnnnnnnnnnnnnnnnnnnnnnnnnnnnnnnnnnnnnnnnnnnnnnnnnnnnnnnnnnnnnnnnnnnnnnnnnnnnnnnnnnnnnnnnnnnnnnnnnnnnnnnnnnnnnnnnnnnnnnnnnnnnnnnnnnnnnnnnnnnnnnnnnnnnnnnnnnnnnnnnnnnnnnnnnnnnnnnnnnnnnnnnnnnnnnnnnnnnnnnnnnnnnnnnnnnnnnnnnnnnnnnnnnnnnnnnnnnnnnnnnnnnnnnnnnnnnnnnnnnnnnnnnnnnnnnnnnnnnnnnnnnnnnnnnnnnnnnnnnnnnnnnnnnnnnnnnnnnnnnnnnnnnnnnnnnnnnnnnnnnnnnnnnnnnnnnnnnnnnnnnnnnnnnnnnnnnnnnnnnnnnnnnnnnnnnnnnnnnnnnnnnnnnnnnnnnnnnnnnnnnnnnnnnnnnnnnnnnnnnnnnnnnnnnnnnnnnnnnnnnnnnnnnnnnnnnnnnnnnnnnnnnnnnnnnnnnnnnnnnnnnnnnnnnnnnnnnnnnnnnnnnnnnnnnnnnnnnnnnnnnnnnnnnnnnnnnnnnnnnnnnnnnnnnnnnnnnnnnnnnnnnnnnnnnnnnnnnnnnnnnnnnnnnnnnnnnnnnnnnnnnnnnnnnnnnnnnnnnnnnnnnnnnnnnnnnnnnnnnnnnnnnnnnnnnnnnnnnnnnnnnnnnnnnnnnnnnnnnnnnnnnnnnnnnnnnnnnnnnnnnnnnnnnnnnnnnnnnnnnnnnnnnnnnnnnnnnnnnnnnnnnnnnnnnnnnnnnnnnnnnnnnnnnnnnnnnnnnnnnnnnnnnnnnnnnnnnnnnnnnnnnnnnnnnnnnnnnnnnnnnnnnnnnnnnnnnnnnnnnnnnnnnnnnnnnnnnnnnnnnnnnnnnnnnnnnnnnnnnnnnnnnnnnnnnnnnnnnnnnnnnnnnnnnnnnnnnnnnnnnnnnnnnnnnnnnnnnnnnnnnnnnnnnnnnnnnnnnnnnnnnnnnnnnnnnnnnnnnnnnnnnnnnnnnnnnnnnnnnnnnnnnnnnnnnnnnnnnnnnnnnnnnnnnnnnnnnnnnnnnnnnnnnnnnnnnnnnnnnnnnnnnnnnnnnnnnnnnnnnnnnnnnnnnnnnnnnnnnnnnnnnnnnnnnnnnnnnnnnnnnnnnnnnnnnnnnnnnnnnnnnnnnnnnnnnnnnnnnnnnnnnnnnnnnnnnnnnnnnnnnnnnnnnnnnnnnnnnnnnnnnnnnnnnnnnnnnnnnnnnnnnnnnnnnnnnnnnnnnnnnnnnnnnnnnnnnnnnnnnnnnnnnnnnnnnnnnnnnnnnnnnnnnnnnnnnnnnnnnnnnnnnnnnnnnnnnnnnnnnnnnnnnnnnnnnnnnnnnnnnnnnnnnnnnnnnnnnnnnnnnnnnnnnnnnnnnnnnnnnnnnnnnnnnnnnnnnnnnnnnnnnnnnnnnnnnnnnnnnnnnnnnnnnnnnnnnnnnnnnnnnnnnnnnnnnnnnnnnnnnnnnnnnnnnnnnnnnnnnnnnnnnnnnnnnnnnnnnnnnnnnnnnnnnnnnnnnnnnnnnnnnnnnnnnnnnnnnnnnnnnnnnnnnnnnnnnnnnnnnnnnnnnnnnnnnnnnnnnnnnnnnnnnnnnnnnnnnnnnnnnnnnnnnnnnnnnnnnnnnnnnnnnnnnnnnnnnnnnnnnnnnnnnnnnnnnnnnnnnnnnnnnnnnnnnnnnnnnnnnnnnnnnnnnnnnnnnnnnnnnnnnnnnnnnnnnnnnnnnnnnnnnnnnnnnnnnnnnnnnnnnnnnnnnnnnnnnnnnnnnnnnnnnnnnnnnnnnnnnnnnnnnnnnnnnnnnnnnnnnnnnnnnnnnnnnnnnnnnnnnnnnnnnnnnnnnnnnnnnnnnnnnnnnnnnnnnnnnnnnnnnnnnnnnnnnnnnnnnnnnnnnnnnnnnnnnnnnnnnnnnnnnnnnnnnnnnnnnnnnnnnnnnnnnnnnnnnnnnnnnnnnnnnnnnnnnnnnnnnnnnnnnnnnnnnnnnnnnnnnnnnnnnnnnnnnnnnnnnnnnnnnnnnnnnnnnnnnnnnnnnnnnnnnnnnnnnnnnnnnnnnnnnnnnnnnnnnnnnnnnnnnnnnnnnnnnnnnnnnnnnnnnnnnnnnnnnnnnnnnnnnnnnnnnnnnnnnnnnnnnnnnnnnnnnnnnnnnnnnnnnnnnnnnnnnnnnnnnnnnnnnnnnnnnnnnnnnnnnnnnnnnnnnnnnnnnnnnnnnnnnnnnnnnnnnnnnnnnnnnnnnnnnnnnnnnnnnnnnnnnnnnnnnnnnnnnnnnnnnnnnnnnnnnnnnnnnnnnnnnnnnnnnnnnnnnnnnnnnnnnnnnnnnnnnnnnnnnnnnnnnnnnnnnnnnnnnnnnnnnnnnnnnnnnnnnnnnnnnnnnnnnnnnnnnnnnnnnnnnnnnnnnnnnnnnnnnnnnnnnnnnnnnnnnnnnnnnnnnnnnnnnnnnnnnnnnnnnnnnnnnnnnnnnnnnnnnnnnnnnnnnnnnnnnnnnnnnnnnnnnnnnnnnnnnnnnnnnnnnnnnnnnnnnnnnnnnnnnnnnnnnnnnnnnnnnnnnnnnnnnnnnnnnnnnnnnnnnnnnnnnnnnnnnnnnnnnnnnnnnnnnnnnnnnnnnnnnnnnnnnnnnnnnnnnnnnnnnnnnnnnnnnnnnnnnnnnnnnnnnnnnnnnnnnnnnnnnnnnnnnnnnnnnnnnnnnnnnnnnnnnnnnnnnnnnnnnnnnnnnnnnnnnnnnnnnnnnnnnnnnnnnnnnnnnnnnnnnnnnnnnnnnnnnnnnnnnnnnnnnnnnnnnnnnnnnnnnnnnnnnnnnnnnnnnnnnnnnnnnnnnnnnnnnnnnnnnnnnnnnnnnnnnnnnnnnnnnnnnnnnnnnnnnnnnnnnnnnnnnnnnnnnnnnnnnnnnnnnnnnnnnnnnnnnnnnnnnnnnnnnnnnnnnnnnnnnnnnnnnnnnnnnnnnnnnnnnnnnnnnnnnnnnnnnnnnnnnnnnnnnnnnnnnnnnnnnnnnnnnnnnnnnnnnnnnnnnnnnnnnnnnnnnnnnnnnnnnnnnnnnnnnnnnnnnnnnnnnnnnnnnnnnnnnnnnnnnnnnnnnnnnnnnnnnnnnnnnnnnnnnnnnnnnnnnnnnnnnnnnnnnnnnnnnnnnnnnnnnnnnnnnnnnnnnnnnnnnnnnnnnnnnnnnnnnnnnnnnnnnnnnnnnnnnnnnnnnnnnnnnnnnnnnnnnnnnnnnnnnnnnnnnnnnnnnnnnnnnnnnnnnnnnnnnnnnnnnnnnnnnnnnnnnnnnnnnnnnnnnnnnnnnnnnnnnnnnnnnnnnnnnnnnnnnnnnnnnnnnnnnnnnnnnnnnnnnnnnnnnnnnnnnnnnnnnnnnnnnnnnnnnnnnnnnnnnnnnnnnnnnnnnnnnnnnnnnnnnnnnnnnnnnnnnnnnnnnnnnnnnnnnnnnnnnnnnnnnnnnnnnnnnnnnnnnnnnnnnnnnnnnnnnnnnnnnnnnnnnnnnnnnnnnnnnnnnnnnnnnnnnnnnnnnnnnnnnnnnnnnnnnnnnnnnnnnnnnnnnnnnnnnnnnnnnnnnnnnnnnnnnnnnnnnnnnnnnnnnnnnnnnnnnnnnnnnnnnnnnnnnnnnnnnnnnnnnnnnnnnnnnnnnnnnnnnnnnnnnnnnnnnnnnnnnnnnnnnnnnnnnnnnnnnnnnnnnnnnnnnnnnnnnnnnnnnnnnnnnnnnnnnnnnnnnnnnnnnnnnnnnnnnnnnnnnnnnnnnnnnnnnnnnnnnnnnnnnnnnnnnnnnnnnnnnnnnnnnnnnnnnnnnnnnnnnnnnnnnnnnnnnnnnnnnnnnnnnnnnnnnnnnnnnnnnnnnnnnnnnnnnnnnnnnnnnnnnnnnnnnnnnnnnnnnnnnnnnnnnnnnnnnnnnnnnnnnnnnnnnnnnnnnnnnnnnnnnnnnnnnnnnnnnnnnnnnnnnnnnnnnnnnnnnnnnnnnnnnnnnnnnnnnnnnnnnnnnnnnnnnnnnnnnnnnnnnnnnnnnnnnnnnnnnnnnnnnnnnnnnnnnnnnnnnnnnnnnnnnnnnnnnnnnnnnnnnnnnnnnnnnnnnnnnnnnnnnnnnnnnnnnnnnnnnnnnnnnnnnnnnnnnnnnnnnnnnnnnnnnnnnnnnnnnnnnnnnnnnnnnnnnnnnnnnnnnnnnnnnnnnnnnnnnnnnnnnnnnnnnnnnnnnnnnnnnnnnnnnnnnnnnnnnnnnnnnnnnnnnnnnnnnnnnnnnnnnnnnnnnnnnnnnnnnnnnnnnnnnnnnnnnnnnnnnnnnnnnnnnnnnnnnnnnnnnnnnnnnnnnnnnnnnnnnnnnnnnnnnnnnnnnnnnnnnnnnnnnnnnnnnnnnnnnnnnnnnnnnnnnnnnnnnnnnnnnnnnnnnnnnnnnnnnnnnnnnnnnnnnnnnnnnnnnnnnnnnnnnnnnnnnnnnnnnnnnnnnnnnnnnnnnnnnnnnnnnnnnnnnnnnnnnnnnnnnnnnnnnnnnnnnnnnnnnnnnnnnnnnnnnnnnnnnnnnnnnnnnnnnnnnnnnnnnnnnnnnnnnnnnnnnnnnnnnnnnnnnnnnnnnnnnnnnnnnnnnnnnnnnnnnnnnnnnnnnnnnnnnnnnnnnnnnnnnnnnnnnnnnnnnnnnnnnnnnnnnnnnnnnnnnnnnnnnnnnnnnnnnnnnnnnnnnnnnnnnnnnnnnnnnnnnnnnnnnnnnnnnnnnnnnnnnnnnnnnnnnnnnnnnnnnnnnnnnnnnnnnnnnnnnnnnnnnnnnnnnnnnnnnnnnnnnnnnnnnnnnnnnnnnnnnnnnnnnnnnnnnnnnnnnnnnnnnnnnnnnnnnnnnnnnnnnnnnnnnnnnnnnnnnnnnnnnnnnnnnnnnnnnnnnnnnnnnnnnnnnnnnnnnnnnnnnnnnnnnnnnnnnnnnnnnnnnnnnnnnnnnnnnnnnnnnnnnnnnnnnnnnnnnnnnnnnnnnnnnnnnnnnnnnnnnnnnnnnnnnnnnnnnnnnnnnnnnnnnnnnnnnnnnnnnnnnnnnnnnnnnnnnnnnnnnnnnnnnnnnnnnnnnnnnnnnnnnnnnnnnnnnnnnnnnnnnnnnnnnnnnnnnnnnnnnnnnnnnnnnnnnnnnnnnnnnnnnnnnnnnnnnnnnnnnnnnnnnnnnnnnnnnnnnnnnnnnnnnnnnnnnnnnnnnnnnnnnnnnnnnnnnnnnnnnnnnnnnnnnnnnnnnnnnnnnnnnnnnnnnnnnnnnnnnnnnnnnnnnnnnnnnnnnnnnnnnnnnnnnnnnnnnnnnnnnnnnnnnnnnnnnnnnnnnnnnnnnnnnnnnnnnnnnnnnnnnnnnnnnnnnnnnnnnnnnnnnnnnnnnnnnnnnnnnnnnnnnnnnnnnnnnnnnnnnnnnnnnnnnnnnnnnnnnnnnnnnnnnnnnnnnnnnnnnnnnnnnnnnnnnnnnnnnnnnnnnnnnnnnnnnnnnnnnnnnnnnnnnnnnnnnnnnnnnnnnnnnnnnnnnnnnnnnnnnnnnnnnnnnnnnnnnnnnnnnnnnnnnnnnnnnnnnnnnnnnnnnnnnnnnnnnnnnnnnnnnnnnnnnnnnnnnnnnnnnnnnnnnnnnnnnnnnnnnnnnnnnnnnnnnnnnnnnnnnnnnnnnnnnnnnnnnnnnnnnnnnnnnnnnnnnnnnnnnnnnnnnnnnnnnnnnnnnnnnnnnnnnnnnnnnnnnnnnnnnnnnnnnnnnnnnnnnnnnnnnnnnnnnnnnnnnnnnnnnnnnnnnnnnnnnnnnnnnnnnnnnnnnnnnnnnnnnnnnnnnnnnnnnnnnnnnnnnnnnnnnnnnnnnnnnnnnnnnnnnnnnnnnnnnnnnnnnnnnnnnnnnnnnnnnnnnnnnnnnnnnnnnnnnnnnnnnnnnnnnnnnnnnnnnnnnnnnnnnnnnnnnnnnnnnnnnnnnnnnnnnnnnnnnnnnnnnnnnnnnnnnnnnnnnnnnnnnnnnnnnnnnnnnnnnnnnnnnnnnnnnnnnnnnnnnnnnnnnnnnnnnnnnnnnnnnnnnnnnnnnnnnnnnnnnnnnnnnnnnnnnnnnnnnnnnnnnnnnnnnnnnnnnnnnnnnnnnnnnnnnnnnnnnnnnnnnnnnnnnnnnnnnnnnnnnnnnnnnnnnnnnnnnnnnnnnnnnnnnnnnnnnnnnnnnnnnnnnnnnnnnnnnnnnnnnnnnnnnnnnnnnnnnnnnnnnnnnnnnnnnnnnnnnnnnnnnnnnnnnnnnnnnnnnnnnnnnnnnnnnnnnnnnnnnnnnnnnnnnnnnnnnnnnnnnnnnnnnnnnnnnnnnnnnnnnnnnnnnnnnnnnnnnnnnnnnnnnnnnnnnnnnnnnnnnnnnnnnnnnnnnnnnnnnnnnnnnnnnnnnnnnnnnnnnnnnnnnnnnnnnnnnnnnnnnnnnnnnnnnnnnnnnnnnnnnnnnnnnnnnnnnnnnnnnnnnnnnnnnnnnnnnnnnnnnnnnnnnnnnnnnnnnnnnnnnnnnnnnnnnnnnnnnnnnnnnnnnnnnnnnnnnnnnnnnnnnnnnnnnnnnnnnnnnnnnnnnnnnnnnnnnnnnnnnnnnnnnnnnnnnnnnnnnnnnnnnnnnnnnnnnnnnnnnnnnnnnnnnnnnnnnnnnnnnnnnnnnnnnnnnnnnnnnnnnnnnnnnnnnnnnnnnnnnnnnnnnnnnnnnnnnnnnnnnnnnnnnnnnnnnnnnnnnnnnnnnnnnnnnnnnnnnnnnnnnnnnnnnnnnnnnnnnnnnnnnnnnnnnnnnnnnnnnnnnnnnnnnnnnnnnnnnnnnnnnnnnnnnnnnnnnnnnnnnnnnnnnnnnnnnnnnnnnnnnnnnnnnnnnnnnnnnnnnnnnnnnnnnnnnnnnnnnnnnnnnnnnnnnnnnnnnnnnnnnnnnnnnnnnnnnnnnnnnnnnnnnnnnnnnnnnnnnnnnnnnnnnnnnnnnnnnnnnnnnnnnnnnnnnnnnnnnnnnnnnnnnnnnnnnnnnnnnnnnnnnnnnnnnnnnnnnnnnnnnnnnnnnnnnnnnnnnnnnnnnnnnnnnnnnnnnnnnnnnnnnnnnnnnnnnnnnnnnnnnnnnnnnnnnnnnnnnnnnnnnnnnnnnnnnnnnnnnnnnnnnnnnnnnnnnnnnnnnnnnnnnnnnnnnnnnnnnnnnnnnnnnnnnnnnnnnnnnnnnnnnnnnnnnnnnnnnnnnnnnnnnnnnnnnnnnnnnnnnnnnnnnnnnnnnnnnnnnnnnnnnnnnnnnnnnnnnnnnnnnnnnnnnnnnnnnnnnnnnnnnnnnnnnnnnnnnnnnnnnnnnnnnnnnnnnnnnnnnnnnnnnnnnnnnnnnnnnnnnnnnnnnnnnnnnnnnnnnnnnnnnnnnnnnnnnnnnnnnnnnnnnnnnnnnnnnnnnnnnnnnnnnnnnnnnnnnnnnnnnnnnnnnnnnnnnnnnnnnnnnnnnnnnnnnnnnnnnnnnnnnnnnnnnnnnnnnnnnnnnnnnnnnnnnnnnnnnnnnnnnnnnnnnnnnnnnnnnnnnnnnnnnnnnnnnnnnnnnnnnnnnnnnnnnnnnnnnnnnnnnnnnnnnnnnnnnnnnnnnnnnnnnnnnnnnnnnnnnnnnnnnnnnnnnnnnnnnnnnnnnnnnnnnnnnnnnnnnnnnnnnnnnnnnnnnnnnnnnnnnnnnnnnnnnnnnnnnnnnnnnnnnnnnnnnnnnnnnnnnnnnnnnnnnnnnnnnnnnnnnnnnnnnnnnnnnnnnnnnnnnnnnnnnnnnnnnnnnnnnnnnnnnnnnnnnnnnnnnnnnnnnnnnnnnnnnnnnnnnnnnnnnnnnnnnnnnnnnnnnnnnnnnnnnnnnnnnnnnnnnnnnnnnnnnnnnnnnnnnnnnnnnnnnnnnnnnnnnnnnnnnnnnnnnnnnnnnnnnnnnnnnnnnnnnnnnnnnnnnnnnnnnnnnnnnnnnnnnnnnnnnnnnnnnnnnnnnnnnnnnnnnnnnnnnnnnnnnnnnnnnnnnnnnnnnnnnnnnnnnnnnnnnnnnnnnnnnnnnnnnnnnnnnnnnnnnnnnnnnnnnnnnnnnnnnnnnnnnnnnnnnnnnnnnnnnnnnnnnnnnnnnnnnnnnnnnnnnnnnnnnnnnnnnnnnnnnnnnnnnnnnnnnnnnnnnnnnnnnnnnnnnnnnnnnnnnnnnnnnnnnnnnnnnnnnnnnnnnnnnnnnnnnnnnnnnnnnnnnnnnnnnnnnnnnnnnnnnnnnnnnnnnnnnnnnnnnnnnnnnnnnnnnnnnnnnnnnnnnnnnnnnnnnnnnnnnnnnnnnnnnnnnnnnnnnnnnnnnnnnnnnnnnnnnnnnnnnnnnnnnnnnnnnnnnnnnnnnnnnnnnnnnnnnnnnnnnnnnnnnnnnnnnnnnnnnnnnnnnnnnnnnnnnnnnnnnnnnnnnnnnnnnnnnnnnnnnnnnnnnnnnnnnnnnnnnnnnnnnnnnnnnnnnnnnnnnnnnnnnnnnnnnnnnnnnnnnnnnnnnnnnnnnnnnnnnnnnnnnnnnnnnnnnnnnnnnnnnnnnnnnnnnnnnnnnnnnnnnnnnnnnnnnnnnnnnnnnnnnnnnnnnnnnnnnnnnnnnnnnnnnnnnnnnnnnnnnnnnnnnnnnnnnnnnnnnnnnnnnnnnnnnnnnnnnnnnnnnnnnnnnnnnnnnnnnnnnnnnnnnnnnnnnnnnnnnnnnnnnnnnnnnnnnnnnnnnnnnnnnnnnnnnnnnnnnnnnnnnnnnnnnnnnnnnnnnnnnnnnnnnnnnnnnnnnnnnnnnnnnnnnnnnnnnnnnnnnnnnnnnnnnnnnnnnnnnnnnnnnnnnnnnnnnnnnnnnnnnnnnnnnnnnnnnnnnnnnnnnnnnnnnnnnnnnnnnnnnnnnnnnnnnnnnnnnnnnnnnnnnnnnnnnnnnnnnnnnnnnnnnnnnnnnnnnnnnnnnnnnnnnnnnnnnnnnnnnnnnnnnnnnnnnnnnnnnnnnnnnnnnnnnnnnnnnnnnnnnnnnnnnnnnnnnnnnnnnnnnnnnnnnnnnnnnnnnnnnnnnnnnnnnnnnnnnnnnnnnnnnnnnnnnnnnnnnnnnnnnnnnnnnnnnnnnnnnnnnnnnnnnnnnnnnnnnnnnnnnnnnnnnnnnnnnnnnnnnnnnnnnnnnnnnnnnnnnnnnnnnnnnnnnnnnnnnnnnnnnnnnnnnnnnnnnnnnnnnnnnnnnnnnnnnnnnnnnnnnnnnnnnnnnnnnnnnnnnnnnnnnnnnnnnnnnnnnnnnnnnnnnnnnnnnnnnnnnnnnnnnnnnnnnnnnnnnnnnnnnnnnnnnnnnnnnnnnnnnnnnnnnnnnnnnnnnnnnnnnnnnnnnnnccaaagcctttttcgcccacggacaggccgtttgccccttcccactaacatcccgtaaacctccccttaaattcccgcccggccaatgggaactcagcgggaagtattttagatgtgtatgggatggggcaaatggggcttctattgatagtgggtatcaaaatgggaggaagtccacaaattgcgcgaattcatacgaattgcttttccagttacgctaccaactgtggtagataacctaaaataaaggacttacttcccaatcgggcaagtaatccatatgtttggagcccgaaggtcccagaacgattggccgacggggacatcgaccttcctgacgctggcgtcgagcgaggcacgagcatggacgccagcaacatctcctgtagtccatactcgcaagctcgctgcactccaggctcaccaacgttggaaggcaaattcacaaattcacaaccggtaaatatggcttgtgaatttgcaacctgctgatagacgggtaattatgaggctaattcacaaaaaaggggtctcttatacatccgcggaagccgattgtaaacaggatatgatgtatccacgctaccagtctataatacatatagaaatagtatatataatatataatagtattatatattattatatattgatattatatcatctctaccttcccttcatctcttgtttgcggcatgagccactgcaaaccggcattctcccctggtccggctggatataagagataagcgtattttgtgaatttgtcccccaactcactgtgccacaataacacacggattcacaagccatatttaccggttgtgaatttgtgaatctgaccttgccggccttaaggaagtttgaaattagagccctattttggacttgacaaattattccttggtaaatttggtgtataatagctatggggcataatgatgttagcctgtggaacggcctctgtaaaggatcaacaagctatcaaccctccccatgcgacaggagcttcaatgtattataatttgacagacaaaccctggatcagtgtgctacagcttgacgggcattctgccaggctcggcctggctgaggtcctgcgaaaagcacacacactgcgtttggcttacggcaatccgatggaccgcatgtccgttttccgtttcctcctcgccctgggctattggtgttttgccaatacaaaacaagcgccggtatcagataagccactgcctcaggcatggacggactggcttgaacaaaaccaagaatatttcgaattgttcggtgatggccccagattctaccaatccccaggaacatccagaatacgccccagcacggaccttatccacgagcttcccacggcaaacaatttctggcacttccgccatgtgaccgatttcatcgatggcatttgcccagcttgctgcgttaccggtctgctgcgcctgccactctttaccaccgtaggcggcagcggaatcggagccggcatcaacagaactcctcccttctatgccatctggcagggtgatagtctgtcggaatcgatattcctgaattgggaacccacttcccggttgggtgttcctgcctggctgaacccgtttggatcccaaaacgagaaggatgtagccttgctgactggcctcacctggctgccccgcaaggtattcctgcttggcccggtgtcagacggagcaaaatgcagcgcctgcggagaagagcatgagcctctggtctatgcctgcaacaatgaggcggtgaaagtgcctccgaaccttgtctggaacgaccctcacgcgatttaccgggatgacaataatggcctgactgcccaggtggctctgatgtccggggacaaatacactttcgctaacagggattggcataaacccctggtcggcttcttacgggcgaaaggcatgtctcggaccgccacgctgtttttagtgggcttcacaagcgttcaagccaaatgtgtggacgtttgggaaaagaccattgccctatccggaaaaacaagctccgaggaactgctggaccagatatccgaaagagcctactccctgcacaggatgaggaaacaagaccgccggggcgattacaaggaatccgtgggaatcaccgccgtggcggacatcatcccgcacgtagagcatcgggttgacgtccattcgggcgagatggtggaaaacagcggcaatgtctggcaggaagcggatgaagattacggattcttcatgaagcgttttgccgtttctctagtgccggaaattacggttgccgccaagcttgaacgagaacaactggctcggcgcaagccctggcccctaaaaccaaaatcaattaaaaaaccttcatccggaggcgataatgaatgagagcaccgtgaaatttgttcggagcctgggcgaactcaaagagggcgacctgggcttgctcagaaagctcaggggtcgccgtctggatgaatccctgccgggtttcgacctgttttccggcctgtggtggccactccgcagtataagccccaaaacccccaggcggaaggtggtctggctagtcaccaagcttttcgcggaattccgctttgagcaaaagaaaggcgccagcctgccttggctcatgggcagaatatgccgtggacttaaagaagaaaaagagttcccacgtgttttagccaggttcgaccgcttgctcacgctcgagttgaaccaactggaggaaccgctggcgcaagtgctcgcgattttaaaaagacatgacattgccagtctggactgggttgccctcatcgatgacctctccgcttgggaacgggaatcaaacagagcgatatggtcagacacatttatttcagcatttaataatcagcaaggaggaatcaaatgttgattgaaatacacatgatccaaaaccacagcccggccaacctgaaccgggacgacctgggcgcgcccaagacctgttatttcggtggggtgttgcggtcccgcatctccagccagtgcctaaagcggagcatcaggatgagcgatgaattcaaaaacttgctcgggggtatccgtacccgtcggttggccgagttgattacaaaagctacaggacaggactgcaggaatcaggcagaggaagttctgaacaaagccggtttgaaacacgaaaacggacatagtaagatgctggtgttcatgacccggaacaagatcgatgcccttgctcaaattgtcaccagcgaaggcctgagtgttgcagagaaagccaagaaagcggcagatgtaatatcgggggcaatacattcccctgacatcgctctgtgcggaagaatgctcgagcccgataccaaggacaagaacacagacaaggtcaagtgggaaaataccactgttgaagcagccctgcaggtgtcgcacgccatttcaacccacatcgcccgcccagaaatagattactatgtagcagctgatgacgagcctggcgacgacacaggtgctggattcatagacgaggcgatgtttgcttcggcctgtttctacaaatattactcaattgattggaataccttgataatcaacctccagggtaatgaaaagttggcagctcatactgtcggagcctttatccaggccgctgcactcactaatcccagcggaaagcagaacagctttgccgcacataaccttcccgatggaatattggtagaaataaaagagacacctgtcagctatgcaaatgcctttgtgcgaccggtgggaatcgttaaggattctgacttggtagaacaaagcattggccaactggccaactatgtgaaggatataagtgccggtttcttccctggacagatgaaaggcaacgctctgtggttctcgcccaatggacgttatcccctaaagcctcaacagggcacgctggacataaagccagtttgcaacctgctagaacttgttcgcgaagcagttgagatgttgggttttgaatgggatgatgtaaaaaacgagaaagtagagagttgaaatgtcttctccgcctaataccctgttcctgagattggaggctccccttcaggcctggggaagcaatgaggccaaattcgccgtgcgcaggacagccgacgcgcccaccaaatccggagtggcaggcctgctctgcgctgccctgggaatcagccgggccgaagccggacagtattggctgggtgaaattgccaaattgcgcatgggggtgcggatagaccgcccgggcatccgctggtgggattaccatactgtgggagcggagcagaagctgcgcatttctgacctgaaaatgcccaacggcctagttctggttggcactgccctggccaaaaacctgggcgcggacaagatcaaatccaaacccggggctttgctctcccgacgcgagtatttggctgatgccagcttcctggttgcgctccagggtgaaccggatatcgtggcacaactggctgaagcgctgaaaaaaccagtctggacgctttatctggggcgaaaatcctgtcccccctcccgtccggtggatgaacacccgccagggttttatgccagtctgaaagaggctttgcggtcgatcccggcgcaactgagggaaaaaggcgaaccgatacctgacagtgttccctgtgtgctcgactgggttccggcccatgatgacgtgcacgctccgccgaacgccgaagcgcattacgacgtgccggtgtcctttgagcctccccaccacttgccccggctggtgatccgctgtaacctgccattggaccgcaacttcgaggcagagaccgtgctttccggcaaagcctggcaaccgccccgcaaccgggcaaattacgacaatcctgaatacaaaagggtccgcgctgagcgtttggtgatggacaatgccgcctgcatgttctgcaaggcacccgccactactgtgcagcacgtgaattaccgacgcgccggaggcagcgagaagccggaggacttgcgcgccctctgccgcctctgccacgatgcctgcaccatgctggaatatggcagcggcatgaccatggaccgcatagatccctgtgaccccgcctggcgtgagcgcatcttggccaaacgcgaggaaataatcaaattccgctcgctggagcagcgcaggcgcaaactcgatccgaaggaggagaacggatgatgtatctatcccaactgctcatcgacacaggcggcaaccctgaccggccaaggcccgggcgcttgtggctgaacaatatctataatgtccaccggcggctcagcatggctttccccatgcgcaagcgcaaggaaggagacccgaggtttctgcagccctttgaccccgcagattttgaaaagcgccagttcctctttcgggtggacaacaacaccgatggagaaaatcaaagggcgatggttttggtgcagtcgtccctgccgccggattgggactgggctttccagaatgccacgggatttttggcagcccctccccaggttaaggaatacgatccccagttctcagcaggtcagcggctgcgcttccgcatcctcgtgaatgccagtgtcaaacgcaaaatcgacgagttgcgggaaggacccggaggaaaggaaaaaacgggaagggttctgcacaaacgggtcgcccttacctgggacacaaattccaacccaaaggatgcggtggcgcaatggtttgccgccaaggctggcagactgggcttcacgcccggggagaccgaactggtaagcctgggctgggtatacggttccaaaccggagccccggggaaattcgccccggcgtgagaacgaataccgtcccctgagataccgttccgccctgctggaaggttatctgacagtggatgatgcctttctgttccgggaagccttggaaaaaggtatcggcagcgccaaaggaatgggcttcggcctcctttccgtggttccggcaagtgatgcgtaacagagaccttcacctaatgccaaaaatgcgggaccgcttcacctatctctatgtggagcatgccaaaatagacaaagaacaacaggcaatcgcctttcacgatgccatgggctccactcctgttccctgcgctggactggccctgctgatgctggggccaggcgtatccatcacccatgcggccatccttgttttagcagaatgcggctgtttggtggcttgggtgggggaacagggagtccgcttttactcatccgggacagggaccacccgtagttccgccaaccttatgcgtcaggctgccgcctggtcaaatcgagatacgcatctgcggatagttcgcagaatgtatgaattgaggttcaaggaaaaactggacccaaccctctctcttgaacagataaggggaaaagagggagcgagagtacgggatacctatttcagactttcaaaagaattcgatgtgcccatgagtgcgaggaattacgacaggagcaactggaataaaaccgaccccatcaacagagccctgtccgttgccaattcctgtctctatggcatctgccacgccgcgatagtggccgctggctattcacctgccctgggtttcgttcatactggcaaacaactgtcatttgtttatgacattgccgatctttataaaatggaaacctccgtgcccgcggctttcatagccacagccgcaggggtcgataacctggacagaaggacacgcattgcctgccgtgaccagttctatcaatttggtctgctaaagaagatagtggccgacattcacgcccttttcggtattctggaaacttcggacgatgagccagaccttgctgatgtcgatccagccgtgccaggcgggctttggaacccagatgataaagtgagccccggcggcttgtcatggggtctggatgatcctggaggccatgatgatggttctggtgcttgaaaaagttccctctggcctgagaggagaaattacacgctggctcctcgaaatcaaggctggagtatttgtcggtcaggtatcggccatgataagggaaaagctgtgggacaaggccaggtctggttgtgccggtggaacttgtatcatgatttacagcaagcattgcgaacaaggctttggaattgagttttggggtgccgcggaaaggatagtgacagaatgggaaggattgaaattgatgaccaagcatccgtgatccatacttgaagcctgttcaatggcctcaaagcgtctactttcgaagtgtgttccccacctgcgtgggggtgaaccggtagcctcgaaactgccgttcttcttggaaaagtgttccccacctgcgtgggggtgaaccgaatacagcccgctgtccttcgagaccgaatccgtgttccccacctgcgtgggggtgaaccgccagacagcacggcatatccacacttaccgaagtgttccccacctgcgtgggggtgaaccgaagctgatctcgccaaagcaatattggcagacgtgttccccacctgcgtgggggtgaaccgcgaagccgcccgccgccaccggccacatcgaggtgttccccacctgcgtgggggtgaaccggctgaactgaccgcaccgcccaagaccgaggagtgttccccacctgcgtgggggtgaaccgctgcttttagtcagcgagggacacgggaagatgtgttccccacctgcgtgggggtgaaccgctgaccccgattgaatgcgaacgcctgatgacgtgttccccacctgcgtgggggtgaaccggcgatctcgtgagagcggaaaggcatcatcaggtgttccccacctgcgtgggggtgaaccgcgggagtttgtcctgcgtgacaatgtccaagcgtgttccccacctgcgtgggggtgaaccgggcgttatttgcaagcttacttgctgcattgagtgttccccacctgcgtgggggtgaaccgggagcgaggcacgggagccaaccgaagaaggagtgttccccacctgcgtgggggtgaaccgccgccctgaatgaacccgcaaaacccgtctgggtgttccccacctgcgtgggggtgaaccgtcatccgtccccctctaacgccatcagtattagtgttccccacctgcgtgggggtgaaccgggtgctgctggcaatgctatcggaaccaccgagtgttccccacctgcgtgggggtgaaccgagataatcacgctcaacaagcactttctcggcgtgttccccacctgcgtgggggtgaaccggatgggcgttgcccggagtgctatgtcgagtggtgttccccacctgcgtgggggtgaaccggtcccggatcgtataggaatcgtcaatctctcgtgttccccacctgcgtgggggtgaaccgattgccttgccgactgccaaatacataaccaaatatt

SEQ ID NO: 1086 - DNA, 104326 bp, Artificial Sequence
  Synthetic Oligonucleotide
  misc_feature (1)..(95919): n is a, c, g, or t
nnnnnnnnnnnnnnnnnnnnnnnnnnnnnnnnnnnnnnnnnnnnnnnnnnnnnnnnnnnnnnnnnnnnnnnnnnnnnnnnnnnnnnnnnnnnnnnnnnnnnnnnnnnnnnnnnnnnnnnnnnnnnnnnnnnnnnnnnnnnnnnnnnnnnnnnnnnnnnnnnnnnnnnnnnnnnnnnnnnnnnnnnnnnnnnnnnnnnnnnnnnnnnnnnnnnnnnnnnnnnnnnnnnnnnnnnnnnnnnnnnnnnnnnnnnnnnnnnnnnnnnnnnnnnnnnnnnnnnnnnnnnnnnnnnnnnnnnnnnnnnnnnnnnnnnnnnnnnnnnnnnnnnnnnnnnnnnnnnnnnnnnnnnnnnnnnnnnnnnnnnnnnnnnnnnnnnnnnnnnnnnnnnnnnnnnnnnnnnnnnnnnnnnnnnnnnnnnnnnnnnnnnnnnnnnnnnnnnnnnnnnnnnnnnnnnnnnnnnnnnnnnnnnnnnnnnnnnnnnnnnnnnnnnnnnnnnnnnnnnnnnnnnnnnnnnnnnnnnnnnnnnnnnnnnnnnnnnnnnnnnnnnnnnnnnnnnnnnnnnnnnnnnnnnnnnnnnnnnnnnnnnnnnnnnnnnnnnnnnnnnnnnnnnnnnnnnnnnnnnnnnnnnnnnnnnnnnnnnnnnnnnnnnnnnnnnnnnnnnnnnnnnnnnnnnnnnnnnnnnnnnnnnnnnnnnnnnnnnnnnnnnnnnnnnnnnnnnnnnnnnnnnnnnnnnnnnnnnnnnnnnnnnnnnnnnnnnnnnnnnnnnnnnnnnnnnnnnnnnnnnnnnnnnnnnnnnnnnnnnnnnnnnnnnnnnnnnnnnnnnnnnnnnnnnnnnnnnnnnnnnnnnnnnnnnnnnnnnnnnnnnnnnnnnnnnnnnnnnnnnnnnnnnnnnnnnnnnnnnnnnnnnnnnnnnnnnnnnnnnnnnnnnnnnnnnnnnnnnnnnnnnnnnnnnnnnnnnnnnnnnnnnnnnnnnnnnnnnnnnnnnnnnnnnnnnnnnnnnnnnnnnnnnnnnnnnnnnnnnnnnnnnnnnnnnnnnnnnnnnnnnnnnnnnnnnnnnnnnnnnnnnnnnnnnnnnnnnnnnnnnnnnnnnnnnnnnnnnnnnnnnnnnnnnnnnnnnnnnnnnnnnnnnnnnnnnnnnnnnnnnnnnnnnnnnnnnnnnnnnnnnnnnnnnnnnnnnnnnnnnnnnnnnnnnnnnnnnnnnnnnnnnnnnnnnnnnnnnnnnnnnnnnnnnnnnnnnnnnnnnnnnnnnnnnnnnnnnnnnnnnnnnnnnnnnnnnnnnnnnnnnnnnnnnnnnnnnnnnnnnnnnnnnnnnnnnnnnnnnnnnnnnnnnnnnnnnnnnnnnnnnnnnnnnnnnnnnnnnnnnnnnnnnnnnnnnnnnnnnnnnnnnnnnnnnnnnnnnnnnnnnnnnnnnnnnnnnnnnnnnnnnnnnnnnnnnnnnnnnnnnnnnnnnnnnnnnnnnnnnnnnnnnnnnnnnnnnnnnnnnnnnnnnnnnnnnnnnnnnnnnnnnnnnnnnnnnnnnnnnnnnnnnnnnnnnnnnnnnnnnnnnnnnnnnnnnnnnnnnnnnnnnnnnnnnnnnnnnnnnnnnnnnnnnnnnnnnnnnnnnnnnnnnnnnnnnnnnnnnnnnnnnnnnnnnnnnnnnnnnnnnnnnnnnnnnnnnnnnnnnnnnnnnnnnnnnnnnnnnnnnnnnnnnnnnnnnnnnnnnnnnnnnnnnnnnnnnnnnnnnnnnnnnnnnnnnnnnnnnnnnnnnnnnnnnnnnnnnnnnnnnnnnnnnnnnnnnnnnnnnnnnnnnnnnnnnnnnnnnnnnnnnnnnnnnnnnnnnnnnnnnnnnnnnnnnnnnnnnnnnnnnnnnnnnnnnnnnnnnnnnnnnnnnnnnnnnnnnnnnnnnnnnnnnnnnnnnnnnnnnnnnnnnnnnnnnnnnnnnnnnnnnnnnnnnnnnnnnnnnnnnnnnnnnnnnnnnnnnnnnnnnnnnnnnnnnnnnnnnnnnnnnnnnnnnnnnnnnnnnnnnnnnnnnnnnnnnnnnnnnnnnnnnnnnnnnnnnnnnnnnnnnnnnnnnnnnnnnnnnnnnnnnnnnnnnnnnnnnnnnnnnnnnnnnnnnnnnnnnnnnnnnnnnnnnnnnnnnnnnnnnnnnnnnnnnnnnnnnnnnnnnnnnnnnnnnnnnnnnnnnnnnnnnnnnnnnnnnnnnnnnnnnnnnnnnnnnnnnnnnnnnnnnnnnnnnnnnnnnnnnnnnnnnnnnnnnnnnnnnnnnnnnnnnnnnnnnnnnnnnnnnnnnnnnnnnnnnnnnnnnnnnnnnnnnnnnnnnnnnnnnnnnnnnnnnnnnnnnnnnnnnnnnnnnnnnnnnnnnnnnnnnnnnnnnnnnnnnnnnnnnnnnnnnnnnnnnnnnnnnnnnnnnnnnnnnnnnnnnnnnnnnnnnnnnnnnnnnnnnnnnnnnnnnnnnnnnnnnnnnnnnnnnnnnnnnnnnnnnnnnnnnnnnnnnnnnnnnnnnnnnnnnnnnnnnnnnnnnnnnnnnnnnnnnnnnnnnnnnnnnnnnnnnnnnnnnnnnnnnnnnnnnnnnnnnnnnnnnnnnnnnnnnnnnnnnnnnnnnnnnnnnnnnnnnnnnnnnnnnnnnnnnnnnnnnnnnnnnnnnnnnnnnnnnnnnnnnnnnnnnnnnnnnnnnnnnnnnnnnnnnnnnnnnnnnnnnnnnnnnnnnnnnnnnnnnnnnnnnnnnnnnnnnnnnnnnnnnnnnnnnnnnnnnnnnnnnnnnnnnnnnnnnnnnnnnnnnnnnnnnnnnnnnnnnnnnnnnnnnnnnnnnnnnnnnnnnnnnnnnnnnnnnnnnnnnnnnnnnnnnnnnnnnnnnnnnnnnnnnnnnnnnnnnnnnnnnnnnnnnnnnnnnnnnnnnnnnnnnnnnnnnnnnnnnnnnnnnnnnnnnnnnnnnnnnnnnnnnnnnnnnnnnnnnnnnnnnnnnnnnnnnnnnnnnnnnnnnnnnnnnnnnnnnnnnnnnnnnnnnnnnnnnnnnnnnnnnnnnnnnnnnnnnnnnnnnnnnnnnnnnnnnnnnnnnnnnnnnnnnnnnnnnnnnnnnnnnnnnnnnnnnnnnnnnnnnnnnnnnnnnnnnnnnnnnnnnnnnnnnnnnnnnnnnnnnnnnnnnnnnnnnnnnnnnnnnnnnnnnnnnnnnnnnnnnnnnnnnnnnnnnnnnnnnnnnnnnnnnnnnnnnnnnnnnnnnnnnnnnnnnnnnnnnnnnnnnnnnnnnnnnnnnnnnnnnnnnnnnnnnnnnnnnnnnnnnnnnnnnnnnnnnnnnnnnnnnnnnnnnnnnnnnnnnnnnnnnnnnnnnnnnnnnnnnnnnnnnnnnnnnnnnnnnnnnnnnnnnnnnnnnnnnnnnnnnnnnnnnnnnnnnnnnnnnnnnnnnnnnnnnnnnnnnnnnnnnnnnnnnnnnnnnnnnnnnnnnnnnnnnnnnnnnnnnnnnnnnnnnnnnnnnnnnnnnnnnnnnnnnnnnnnnnnnnnnnnnnnnnnnnnnnnnnnnnnnnnnnnnnnnnnnnnnnnnnnnnnnnnnnnnnnnnnnnnnnnnnnnnnnnnnnnnnnnnnnnnnnnnnnnnnnnnnnnnnnnnnnnnnnnnnnnnnnnnnnnnnnnnnnnnnnnnnnnnnnnnnnnnnnnnnnnnnnnnnnnnnnnnnnnnnnnnnnnnnnnnnnnnnnnnnnnnnnnnnnnnnnnnnnnnnnnnnnnnnnnnnnnnnnnnnnnnnnnnnnnnnnnnnnnnnnnnnnnnnnnnnnnnnnnnnnnnnnnnnnnnnnnnnnnnnnnnnnnnnnnnnnnnnnnnnnnnnnnnnnnnnnnnnnnnnnnnnnnnnnnnnnnnnnnnnnnnnnnnnnnnnnnnnnnnnnnnnnnnnnnnnnnnnnnnnnnnnnnnnnnnnnnnnnnnnnnnnnnnnnnnnnnnnnnnnnnnnnnnnnnnnnnnnnnnnnnnnnnnnnnnnnnnnnnnnnnnnnnnnnnnnnnnnnnnnnnnnnnnnnnnnnnnnnnnnnnnnnnnnnnnnnnnnnnnnnnnnnnnnnnnnnnnnnnnnnnnnnnnnnnnnnnnnnnnnnnnnnnnnnnnnnnnnnnnnnnnnnnnnnnnnnnnnnnnnnnnnnnnnnnnnnnnnnnnnnnnnnnnnnnnnnnnnnnnnnnnnnnnnnnnnnnnnnnnnnnnnnnnnnnnnnnnnnnnnnnnnnnnnnnnnnnnnnnnnnnnnnnnnnnnnnnnnnnnnnnnnnnnnnnnnnnnnnnnnnnnnnnnnnnnnnnnnnnnnnnnnnnnnnnnnnnnnnnnnnnnnnnnnnnnnnnnnnnnnnnnnnnnnnnnnnnnnnnnnnnnnnnnnnnnnnnnnnnnnnnnnnnnnnnnnnnnnnnnnnnnnnnnnnnnnnnnnnnnnnnnnnnnnnnnnnnnnnnnnnnnnnnnnnnnnnnnnnnnnnnnnnnnnnnnnnnnnnnnnnnnnnnnnnnnnnnnnnnnnnnnnnnnnnnnnnnnnnnnnnnnnnnnnnnnnnnnnnnnnnnnnnnnnnnnnnnnnnnnnnnnnnnnnnnnnnnnnnnnnnnnnnnnnnnnnnnnnnnnnnnnnnnnnnnnnnnnnnnnnnnnnnnnnnnnnnnnnnnnnnnnnnnnnnnnnnnnnnnnnnnnnnnnnnnnnnnnnnnnnnnnnnnnnnnnnnnnnnnnnnnnnnnnnnnnnnnnnnnnnnnnnnnnnnnnnnnnnnnnnnnnnnnnnnnnnnnnnnnnnnnnnnnnnnnnnnnnnnnnnnnnnnnnnnnnnnnnnnnnnnnnnnnnnnnnnnnnnnnnnnnnnnnnnnnnnnnnnnnnnnnnnnnnnnnnnnnnnnnnnnnnnnnnnnnnnnnnnnnnnnnnnnnnnnnnnnnnnnnnnnnnnnnnnnnnnnnnnnnnnnnnnnnnnnnnnnnnnnnnnnnnnnnnnnnnnnnnnnnnnnnnnnnnnnnnnnnnnnnnnnnnnnnnnnnnnnnnnnnnnnnnnnnnnnnnnnnnnnnnnnnnnnnnnnnnnnnnnnnnnnnnnnnnnnnnnnnnnnnnnnnnnnnnnnnnnnnnnnnnnnnnnnnnnnnnnnnnnnnnnnnnnnnnnnnnnnnnnnnnnnnnnnnnnnnnnnnnnnnnnnnnnnnnnnnnnnnnnnnnnnnnnnnnnnnnnnnnnnnnnnnnnnnnnnnnnnnnnnnnnnnnnnnnnnnnnnnnnnnnnnnnnnnnnnnnnnnnnnnnnnnnnnnnnnnnnnnnnnnnnnnnnnnnnnnnnnnnnnnnnnnnnnnnnnnnnnnnnnnnnnnnnnnnnnnnnnnnnnnnnnnnnnnnnnnnnnnnnnnnnnnnnnnnnnnnnnnnnnnnnnnnnnnnnnnnnnnnnnnnnnnnnnnnnnnnnnnnnnnnnnnnnnnnnnnnnnnnnnnnnnnnnnnnnnnnnnnnnnnnnnnnnnnnnnnnnnnnnnnnnnnnnnnnnnnnnnnnnnnnnnnnnnnnnnnnnnnnnnnnnnnnnnnnnnnnnnnnnnnnnnnnnnnnnnnnnnnnnnnnnnnnnnnnnnnnnnnnnnnnnnnnnnnnnnnnnnnnnnnnnnnnnnnnnnnnnnnnnnnnnnnnnnnnnnnnnnnnnnnnnnnnnnnnnnnnnnnnnnnnnnnnnnnnnnnnnnnnnnnnnnnnnnnnnnnnnnnnnnnnnnnnnnnnnnnnnnnnnnnnnnnnnnnnnnnnnnnnnnnnnnnnnnnnnnnnnnnnnnnnnnnnnnnnnnnnnnnnnnnnnnnnnnnnnnnnnnnnnnnnnnnnnnnnnnnnnnnnnnnnnnnnnnnnnnnnnnnnnnnnnnnnnnnnnnnnnnnnnnnnnnnnnnnnnnnnnnnnnnnnnnnnnnnnnnnnnnnnnnnnnnnnnnnnnnnnnnnnnnnnnnnnnnnnnnnnnnnnnnnnnnnnnnnnnnnnnnnnnnnnnnnnnnnnnnnnnnnnnnnnnnnnnnnnnnnnnnnnnnnnnnnnnnnnnnnnnnnnnnnnnnnnnnnnnnnnnnnnnnnnnnnnnnnnnnnnnnnnnnnnnnnnnnnnnnnnnnnnnnnnnnnnnnnnnnnnnnnnnnnnnnnnnnnnnnnnnnnnnnnnnnnnnnnnnnnnnnnnnnnnnnnnnnnnnnnnnnnnnnnnnnnnnnnnnnnnnnnnnnnnnnnnnnnnnnnnnnnnnnnnnnnnnnnnnnnnnnnnnnnnnnnnnnnnnnnnnnnnnnnnnnnnnnnnnnnnnnnnnnnnnnnnnnnnnnnnnnnnnnnnnnnnnnnnnnnnnnnnnnnnnnnnnnnnnnnnnnnnnnnnnnnnnnnnnnnnnnnnnnnnnnnnnnnnnnnnnnnnnnnnnnnnnnnnnnnnnnnnnnnnnnnnnnnnnnnnnnnnnnnnnnnnnnnnnnnnnnnnnnnnnnnnnnnnnnnnnnnnnnnnnnnnnnnnnnnnnnnnnnnnnnnnnnnnnnnnnnnnnnnnnnnnnnnnnnnnnnnnnnnnnnnnnnnnnnnnnnnnnnnnnnnnnnnnnnnnnnnnnnnnnnnnnnnnnnnnnnnnnnnnnnnnnnnnnnnnnnnnnnnnnnnnnnnnnnnnnnnnnnnnnnnnnnnnnnnnnnnnnnnnnnnnnnnnnnnnnnnnnnnnnnnnnnnnnnnnnnnnnnnnnnnnnnnnnnnnnnnnnnnnnnnnnnnnnnnnnnnnnnnnnnnnnnnnnnnnnnnnnnnnnnnnnnnnnnnnnnnnnnnnnnnnnnnnnnnnnnnnnnnnnnnnnnnnnnnnnnnnnnnnnnnnnnnnnnnnnnnnnnnnnnnnnnnnnnnnnnnnnnnnnnnnnnnnnnnnnnnnnnnnnnnnnnnnnnnnnnnnnnnnnnnnnnnnnnnnnnnnnnnnnnnnnnnnnnnnnnnnnnnnnnnnnnnnnnnnnnnnnnnnnnnnnnnnnnnnnnnnnnnnnnnnnnnnnnnnnnnnnnnnnnnnnnnnnnnnnnnnnnnnnnnnnnnnnnnnnnnnnnnnnnnnnnnnnnnnnnnnnnnnnnnnnnnnnnnnnnnnnnnnnnnnnnnnnnnnnnnnnnnnnnnnnnnnnnnnnnnnnnnnnnnnnnnnnnnnnnnnnnnnnnnnnnnnnnnnnnnnnnnnnnnnnnnnnnnnnnnnnnnnnnnnnnnnnnnnnnnnnnnnnnnnnnnnnnnnnnnnnnnnnnnnnnnnnnnnnnnnnnnnnnnnnnnnnnnnnnnnnnnnnnnnnnnnnnnnnnnnnnnnnnnnnnnnnnnnnnnnnnnnnnnnnnnnnnnnnnnnnnnnnnnnnnnnnnnnnnnnnnnnnnnnnnnnnnnnnnnnnnnnnnnnnnnnnnnnnnnnnnnnnnnnnnnnnnnnnnnnnnnnnnnnnnnnnnnnnnnnnnnnnnnnnnnnnnnnnnnnnnnnnnnnnnnnnnnnnnnnnnnnnnnnnnnnnnnnnnnnnnnnnnnnnnnnnnnnnnnnnnnnnnnnnnnnnnnnnnnnnnnnnnnnnnnnnnnnnnnnnnnnnnnnnnnnnnnnnnnnnnnnnnnnnnnnnnnnnnnnnnnnnnnnnnnnnnnnnnnnnnnnnnnnnnnnnnnnnnnnnnnnnnnnnnnnnnnnnnnnnnnnnnnnnnnnnnnnnnnnnnnnnnnnnnnnnnnnnnnnnnnnnnnnnnnnnnnnnnnnnnnnnnnnnnnnnnnnnnnnnnnnnnnnnnnnnnnnnnnnnnnnnnnnnnnnnnnnnnnnnnnnnnnnnnnnnnnnnnnnnnnnnnnnnnnnnnnnnnnnnnnnnnnnnnnnnnnnnnnnnnnnnnnnnnnnnnnnnnnnnnnnnnnnnnnnnnnnnnnnnnnnnnnnnnnnnnnnnnnnnnnnnnnnnnnnnnnnnnnnnnnnnnnnnnnnnnnnnnnnnnnnnnnnnnnnnnnnnnnnnnnnnnnnnnnnnnnnnnnnnnnnnnnnnnnnnnnnnnnnnnnnnnnnnnnnnnnnnnnnnnnnnnnnnnnnnnnnnnnnnnnnnnnnnnnnnnnnnnnnnnnnnnnnnnnnnnnnnnnnnnnnnnnnnnnnnnnnnnnnnnnnnnnnnnnnnnnnnnnnnnnnnnnnnnnnnnnnnnnnnnnnnnnnnnnnnnnnnnnnnnnnnnnnnnnnnnnnnnnnnnnnnnnnnnnnnnnnnnnnnnnnnnnnnnnnnnnnnnnnnnnnnnnnnnnnnnnnnnnnnnnnnnnnnnnnnnnnnnnnnnnnnnnnnnnnnnnnnnnnnnnnnnnnnnnnnnnnnnnnnnnnnnnnnnnnnnnnnnnnnnnnnnnnnnnnnnnnnnnnnnnnnnnnnnnnnnnnnnnnnnnnnnnnnnnnnnnnnnnnnnnnnnnnnnnnnnnnnnnnnnnnnnnnnnnnnnnnnnnnnnnnnnnnnnnnnnnnnnnnnnnnnnnnnnnnnnnnnnnnnnnnnnnnnnnnnnnnnnnnnnnnnnnnnnnnnnnnnnnnnnnnnnnnnnnnnnnnnnnnnnnnnnnnnnnnnnnnnnnnnnnnnnnnnnnnnnnnnnnnnnnnnnnnnnnnnnnnnnnnnnnnnnnnnnnnnnnnnnnnnnnnnnnnnnnnnnnnnnnnnnnnnnnnnnnnnnnnnnnnnnnnnnnnnnnnnnnnnnnnnnnnnnnnnnnnnnnnnnnnnnnnnnnnnnnnnnnnnnnnnnnnnnnnnnnnnnnnnnnnnnnnnnnnnnnnnnnnnnnnnnnnnnnnnnnnnnnnnnnnnnnnnnnnnnnnnnnnnnnnnnnnnnnnnnnnnnnnnnnnnnnnnnnnnnnnnnnnnnnnnnnnnnnnnnnnnnnnnnnnnnnnnnnnnnnnnnnnnnnnnnnnnnnnnnnnnnnnnnnnnnnnnnnnnnnnnnnnnnnnnnnnnnnnnnnnnnnnnnnnnnnnnnnnnnnnnnnnnnnnnnnnnnnnnnnnnnnnnnnnnnnnnnnnnnnnnnnnnnnnnnnnnnnnnnnnnnnnnnnnnnnnnnnnnnnnnnnnnnnnnnnnnnnnnnnnnnnnnnnnnnnnnnnnnnnnnnnnnnnnnnnnnnnnnnnnnnnnnnnnnnnnnnnnnnnnnnnnnnnnnnnnnnnnnnnnnnnnnnnnnnnnnnnnnnnnnnnnnnnnnnnnnnnnnnnnnnnnnnnnnnnnnnnnnnnnnnnnnnnnnnnnnnnnnnnnnnnnnnnnnnnnnnnnnnnnnnnnnnnnnnnnnnnnnnnnnnnnnnnnnnnnnnnnnnnnnnnnnnnnnnnnnnnnnnnnnnnnnnnnnnnnnnnnnnnnnnnnnnnnnnnnnnnnnnnnnnnnnnnnnnnnnnnnnnnnnnnnnnnnnnnnnnnnnnnnnnnnnnnnnnnnnnnnnnnnnnnnnnnnnnnnnnnnnnnnnnnnnnnnnnnnnnnnnnnnnnnnnnnnnnnnnnnnnnnnnnnnnnnnnnnnnnnnnnnnnnnnnnnnnnnnnnnnnnnnnnnnnnnnnnnnnnnnnnnnnnnnnnnnnnnnnnnnnnnnnnnnnnnnnnnnnnnnnnnnnnnnnnnnnnnnnnnnnnnnnnnnnnnnnnnnnnnnnnnnnnnnnnnnnnnnnnnnnnnnnnnnnnnnnnnnnnnnnnnnnnnnnnnnnnnnnnnnnnnnnnnnnnnnnnnnnnnnnnnnnnnnnnnnnnnnnnnnnnnnnnnnnnnnnnnnnnnnnnnnnnnnnnnnnnnnnnnnnnnnnnnnnnnnnnnnnnnnnnnnnnnnnnnnnnnnnnnnnnnnnnnnnnnnnnnnnnnnnnnnnnnnnnnnnnnnnnnnnnnnnnnnnnnnnnnnnnnnnnnnnnnnnnnnnnnnnnnnnnnnnnnnnnnnnnnnnnnnnnnnnnnnnnnnnnnnnnnnnnnnnnnnnnnnnnnnnnnnnnnnnnnnnnnnnnnnnnnnnnnnnnnnnnnnnnnnnnnnnnnnnnnnnnnnnnnnnnnnnnnnnnnnnnnnnnnnnnnnnnnnnnnnnnnnnnnnnnnnnnnnnnnnnnnnnnnnnnnnnnnnnnnnnnnnnnnnnnnnnnnnnnnnnnnnnnnnnnnnnnnnnnnnnnnnnnnnnnnnnnnnnnnnnnnnnnnnnnnnnnnnnnnnnnnnnnnnnnnnnnnnnnnnnnnnnnnnnnnnnnnnnnnnnnnnnnnnnnnnnnnnnnnnnnnnnnnnnnnnnnnnnnnnnnnnnnnnnnnnnnnnnnnnnnnnnnnnnnnnnnnnnnnnnnnnnnnnnnnnnnnnnnnnnnnnnnnnnnnnnnnnnnnnnnnnnnnnnnnnnnnnnnnnnnnnnnnnnnnnnnnnnnnnnnnnnnnnnnnnnnnnnnnnnnnnnnnnnnnnnnnnnnnnnnnnnnnnnnnnnnnnnnnnnnnnnnnnnnnnnnnnnnnnnnnnnnnnnnnnnnnnnnnnnnnnnnnnnnnnnnnnnnnnnnnnnnnnnnnnnnnnnnnnnnnnnnnnnnnnnnnnnnnnnnnnnnnnnnnnnnnnnnnnnnnnnnnnnnnnnnnnnnnnnnnnnnnnnnnnnnnnnnnnnnnnnnnnnnnnnnnnnnnnnnnnnnnnnnnnnnnnnnnnnnnnnnnnnnnnnnnnnnnnnnnnnnnnnnnnnnnnnnnnnnnnnnnnnnnnnnnnnnnnnnnnnnnnnnnnnnnnnnnnnnnnnnnnnnnnnnnnnnnnnnnnnnnnnnnnnnnnnnnnnnnnnnnnnnnnnnnnnnnnnnnnnnnnnnnnnnnnnnnnnnnnnnnnnnnnnnnnnnnnnnnnnnnnnnnnnnnnnnnnnnnnnnnnnnnnnnnnnnnnnnnnnnnnnnnnnnnnnnnnnnnnnnnnnnnnnnnnnnnnnnnnnnnnnnnnnnnnnnnnnnnnnnnnnnnnnnnnnnnnnnnnnnnnnnnnnnnnnnnnnnnnnnnnnnnnnnnnnnnnnnnnnnnnnnnnnnnnnnnnnnnnnnnnnnnnnnnnnnnnnnnnnnnnnnnnnnnnnnnnnnnnnnnnnnnnnnnnnnnnnnnnnnnnnnnnnnnnnnnnnnnnnnnnnnnnnnnnnnnnnnnnnnnnnnnnnnnnnnnnnnnnnnnnnnnnnnnnnnnnnnnnnnnnnnnnnnnnnnnnnnnnnnnnnnnnnnnnnnnnnnnnnnnnnnnnnnnnnnnnnnnnnnnnnnnnnnnnnnnnnnnnnnnnnnnnnnnnnnnnnnnnnnnnnnnnnnnnnnnnnnnnnnnnnnnnnnnnnnnnnnnnnnnnnnnnnnnnnnnnnnnnnnnnnnnnnnnnnnnnnnnnnnnnnnnnnnnnnnnnnnnnnnnnnnnnnnnnnnnnnnnnnnnnnnnnnnnnnnnnnnnnnnnnnnnnnnnnnnnnnnnnnnnnnnnnnnnnnnnnnnnnnnnnnnnnnnnnnnnnnnnnnnnnnnnnnnnnnnnnnnnnnnnnnnnnnnnnnnnnnnnnnnnnnnnnnnnnnnnnnnnnnnnnnnnnnnnnnnnnnnnnnnnnnnnnnnnnnnnnnnnnnnnnnnnnnnnnnnnnnnnnnnnnnnnnnnnnnnnnnnnnnnnnnnnnnnnnnnnnnnnnnnnnnnnnnnnnnnnnnnnnnnnnnnnnnnnnnnnnnnnnnnnnnnnnnnnnnnnnnnnnnnnnnnnnnnnnnnnnnnnnnnnnnnnnnnnnnnnnnnnnnnnnnnnnnnnnnnnnnnnnnnnnnnnnnnnnnnnnnnnnnnnnnnnnnnnnnnnnnnnnnnnnnnnnnnnnnnnnnnnnnnnnnnnnnnnnnnnnnnnnnnnnnnnnnnnnnnnnnnnnnnnnnnnnnnnnnnnnnnnnnnnnnnnnnnnnnnnnnnnnnnnnnnnnnnnnnnnnnnnnnnnnnnnnnnnnnnnnnnnnnnnnnnnnnnnnnnnnnnnnnnnnnnnnnnnnnnnnnnnnnnnnnnnnnnnnnnnnnnnnnnnnnnnnnnnnnnnnnnnnnnnnnnnnnnnnnnnnnnnnnnnnnnnnnnnnnnnnnnnnnnnnnnnnnnnnnnnnnnnnnnnnnnnnnnnnnnnnnnnnnnnnnnnnnnnnnnnnnnnnnnnnnnnnnnnnnnnnnnnnnnnnnnnnnnnnnnnnnnnnnnnnnnnnnnnnnnnnnnnnnnnnnnnnnnnnnnnnnnnnnnnnnnnnnnnnnnnnnnnnnnnnnnnnnnnnnnnnnnnnnnnnnnnnnnnnnnnnnnnnnnnnnnnnnnnnnnnnnnnnnnnnnnnnnnnnnnnnnnnnnnnnnnnnnnnnnnnnnnnnnnnnnnnnnnnnnnnnnnnnnnnnnnnnnnnnnnnnnnnnnnnnnnnnnnnnnnnnnnnnnnnnnnnnnnnnnnnnnnnnnnnnnnnnnnnnnnnnnnnnnnnnnnnnnnnnnnnnnnnnnnnnnnnnnnnnnnnnnnnnnnnnnnnnnnnnnnnnnnnnnnnnnnnnnnnnnnnnnnnnnnnnnnnnnnnnnnnnnnnnnnnnnnnnnnnnnnnnnnnnnnnnnnnnnnnnnnnnnnnnnnnnnnnnnnnnnnnnnnnnnnnnnnnnnnnnnnnnnnnnnnnnnnnnnnnnnnnnnnnnnnnnnnnnnnnnnnnnnnnnnnnnnnnnnnnnnnnnnnnnnnnnnnnnnnnnnnnnnnnnnnnnnnnnnnnnnnnnnnnnnnnnnnnnnnnnnnnnnnnnnnnnnnnnnnnnnnnnnnnnnnnnnnnnnnnnnnnnnnnnnnnnnnnnnnnnnnnnnnnnnnnnnnnnnnnnnnnnnnnnnnnnnnnnnnnnnnnnnnnnnnnnnnnnnnnnnnnnnnnnnnnnnnnnnnnnnnnnnnnnnnnnnnnnnnnnnnnnnnnnnnnnnnnnnnnnnnnnnnnnnnnnnnnnnnnnnnnnnnnnnnnnnnnnnnnnnnnnnnnnnnnnnnnnnnnnnnnnnnnnnnnnnnnnnnnnnnnnnnnnnnnnnnnnnnnnnnnnnnnnnnnnnnnnnnnnnnnnnnnnnnnnnnnnnnnnnnnnnnnnnnnnnnnnnnnnnnnnnnnnnnnnnnnnnnnnnnnnnnnnnnnnnnnnnnnnnnnnnnnnnnnnnnnnnnnnnnnnnnnnnnnnnnnnnnnnnnnnnnnnnnnnnnnnnnnnnnnnnnnnnnnnnnnnnnnnnnnnnnnnnnnnnnnnnnnnnnnnnnnnnnnnnnnnnnnnnnnnnnnnnnnnnnnnnnnnnnnnnnnnnnnnnnnnnnnnnnnnnnnnnnnnnnnnnnnnnnnnnnnnnnnnnnnnnnnnnnnnnnnnnnnnnnnnnnnnnnnnnnnnnnnnnnnnnnnnnnnnnnnnnnnnnnnnnnnnnnnnnnnnnnnnnnnnnnnnnnnnnnnnnnnnnnnnnnnnnnnnnnnnnnnnnnnnnnnnnnnnnnnnnnnnnnnnnnnnnnnnnnnnnnnnnnnnnnnnnnnnnnnnnnnnnnnnnnnnnnnnnnnnnnnnnnnnnnnnnnnnnnnnnnnnnnnnnnnnnnnnnnnnnnnnnnnnnnnnnnnnnnnnnnnnnnnnnnnnnnnnnnnnnnnnnnnnnnnnnnnnnnnnnnnnnnnnnnnnnnnnnnnnnnnnnnnnnnnnnnnnnnnnnnnnnnnnnnnnnnnnnnnnnnnnnnnnnnnnnnnnnnnnnnnnnnnnnnnnnnnnnnnnnnnnnnnnnnnnnnnnnnnnnnnnnnnnnnnnnnnnnnnnnnnnnnnnnnnnnnnnnnnnnnnnnnnnnnnnnnnnnnnnnnnnnnnnnnnnnnnnnnnnnnnnnnnnnnnnnnnnnnnnnnnnnnnnnnnnnnnnnnnnnnnnnnnnnnnnnnnnnnnnnnnnnnnnnnnnnnnnnnnnnnnnnnnnnnnnnnnnnnnnnnnnnnnnnnnnnnnnnnnnnnnnnnnnnnnnnnnnnnnnnnnnnnnnnnnnnnnnnnnnnnnnnnnnnnnnnnnnnnnnnnnnnnnnnnnnnnnnnnnnnnnnnnnnnnnnnnnnnnnnnnnnnnnnnnnnnnnnnnnnnnnnnnnnnnnnnnnnnnnnnnnnnnnnnnnnnnnnnnnnnnnnnnnnnnnnnnnnnnnnnnnnnnnnnnnnnnnnnnnnnnnnnnnnnnnnnnnnnnnnnnnnnnnnnnnnnnnnnnnnnnnnnnnnnnnnnnnnnnnnnnnnnnnnnnnnnnnnnnnnnnnnnnnnnnnnnnnnnnnnnnnnnnnnnnnnnnnnnnnnnnnnnnnnnnnnnnnnnnnnnnnnnnnnnnnnnnnnnnnnnnnnnnnnnnnnnnnnnnnnnnnnnnnnnnnnnnnnnnnnnnnnnnnnnnnnnnnnnnnnnnnnnnnnnnnnnnnnnnnnnnnnnnnnnnnnnnnnnnnnnnnnnnnnnnnnnnnnnnnnnnnnnnnnnnnnnnnnnnnnnnnnnnnnnnnnnnnnnnnnnnnnnnnnnnnnnnnnnnnnnnnnnnnnnnnnnnnnnnnnnnnnnnnnnnnnnnnnnnnnnnnnnnnnnnnnnnnnnnnnnnnnnnnnnnnnnnnnnnnnnnnnnnnnnnnnnnnnnnnnnnnnnnnnnnnnnnnnnnnnnnnnnnnnnnnnnnnnnnnnnnnnnnnnnnnnnnnnnnnnnnnnnnnnnnnnnnnnnnnnnnnnnnnnnnnnnnnnnnnnnnnnnnnnnnnnnnnnnnnnnnnnnnnnnnnnnnnnnnnnnnnnnnnnnnnnnnnnnnnnnnnnnnnnnnnnnnnnnnnnnnnnnnnnnnnnnnnnnnnnnnnnnnnnnnnnnnnnnnnnnnnnnnnnnnnnnnnnnnnnnnnnnnnnnnnnnnnnnnnnnnnnnnnnnnnnnnnnnnnnnnnnnnnnnnnnnnnnnnnnnnnnnnnnnnnnnnnnnnnnnnnnnnnnnnnnnnnnnnnnnnnnnnnnnnnnnnnnnnnnnnnnnnnnnnnnnnnnnnnnnnnnnnnnnnnnnnnnnnnnnnnnnnnnnnnnnnnnnnnnnnnnnnnnnnnnnnnnnnnnnnnnnnnnnnnnnnnnnnnnnnnnnnnnnnnnnnnnnnnnnnnnnnnnnnnnnnnnnnnnnnnnnnnnnnnnnnnnnnnnnnnnnnnnnnnnnnnnnnnnnnnnnnnnnnnnnnnnnnnnnnnnnnnnnnnnnnnnnnnnnnnnnnnnnnnnnnnnnnnnnnnnnnnnnnnnnnnnnnnnnnnnnnnnnnnnnnnnnnnnnnnnnnnnnnnnnnnnnnnnnnnnnnnnnnnnnnnnnnnnnnnnnnnnnnnnnnnnnnnnnnnnnnnnnnnnnnnnnnnnnnnnnnnnnnnnnnnnnnnnnnnnnnnnnnnnnnnnnnnnnnnnnnnnnnnnnnnnnnnnnnnnnnnnnnnnnnnnnnnnnnnnnnnnnnnnnnnnnnnnnnnnnnnnnnnnnnnnnnnnnnnnnnnnnnnnnnnnnnnnnnnnnnnnnnnnnnnnnnnnnnnnnnnnnnnnnnnnnnnnnnnnnnnnnnnnnnnnnnnnnnnnnnnnnnnnnnnnnnnnnnnnnnnnnnnnnnnnnnnnnnnnnnnnnnnnnnnnnnnnnnnnnnnnnnnnnnnnnnnnnnnnnnnnnnnnnnnnnnnnnnnnnnnnnnnnnnnnnnnnnnnnnnnnnnnnnnnnnnnnnnnnnnnnnnnnnnnnnnnnnnnnnnnnnnnnnnnnnnnnnnnnnnnnnnnnnnnnnnnnnnnnnnnnnnnnnnnnnnnnnnnnnnnnnnnnnnnnnnnnnnnnnnnnnnnnnnnnnnnnnnnnnnnnnnnnnnnnnnnnnnnnnnnnnnnnnnnnnnnnnnnnnnnnnnnnnnnnnnnnnnnnnnnnnnnnnnnnnnnnnnnnnnnnnnnnnnnnnnnnnnnnnnnnnnnnnnnnnnnnnnnnnnnnnnnnnnnnnnnnnnnnnnnnnnnnnnnnnnnnnnnnnnnnnnnnnnnnnnnnnnnnnnnnnnnnnnnnnnnnnnnnnnnnnnnnnnnnnnnnnnnnnnnnnnnnnnnnnnnnnnnnnnnnnnnnnnnnnnnnnnnnnnnnnnnnnnnnnnnnnnnnnnnnnnnnnnnnnnnnnnnnnnnnnnnnnnnnnnnnnnnnnnnnnnnnnnnnnnnnnnnnnnnnnnnnnnnnnnnnnnnnnnnnnnnnnnnnnnnnnnnnnnnnnnnnnnnnnnnnnnnnnnnnnnnnnnnnnnnnnnnnnnnnnnnnnnnnnnnnnnnnnnnnnnnnnnnnnnnnnnnnnnnnnnnnnnnnnnnnnnnnnnnnnnnnnnnnnnnnnnnnnnnnnnnnnnnnnnnnnnnnnnnnnnnnnnnnnnnnnnnnnnnnnnnnnnnnnnnnnnnnnnnnnnnnnnnnnnnnnnnnnnnnnnnnnnnnnnnnnnnnnnnnnnnnnnnnnnnnnnnnnnnnnnnnnnnnnnnnnnnnnnnnnnnnnnnnnnnnnnnnnnnnnnnnnnnnnnnnnnnnnnnnnnnnnnnnnnnnnnnnnnnnnnnnnnnnnnnnnnnnnnnnnnnnnnnnnnnnnnnnnnnnnnnnnnnnnnnnnnnnnnnnnnnnnnnnnnnnnnnnnnnnnnnnnnnnnnnnnnnnnnnnnnnnnnnnnnnnnnnnnnnnnnnnnnnnnnnnnnnnnnnnnnnnnnnnnnnnnnnnnnnnnnnnnnnnnnnnnnnnnnnnnnnnnnnnnnnnnnnnnnnnnnnnnnnnnnnnnnnnnnnnnnnnnnnnnnnnnnnnnnnnnnnnnnnnnnnnnnnnnnnnnnnnnnnnnnnnnnnnnnnnnnnnnnnnnnnnnnnnnnnnnnnnnnnnnnnnnnnnnnnnnnnnnnnnnnnnnnnnnnnnnnnnnnnnnnnnnnnnnnnnnnnnnnnnnnnnnnnnnnnnnnnnnnnnnnnnnnnnnnnnnnnnnnnnnnnnnnnnnnnnnnnnnnnnnnnnnnnnnnnnnnnnnnnnnnnnnnnnnnnnnnnnnnnnnnnnnnnnnnnnnnnnnnnnnnnnnnnnnnnnnnnnnnnnnnnnnnnnnnnnnnnnnnnnnnnnnnnnnnnnnnnnnnnnnnnnnnnnnnnnnnnnnnnnnnnnnnnnnnnnnnnnnnnnnnnnnnnnnnnnnnnnnnnnnnnnnnnnnnnnnnnnnnnnnnnnnnnnnnnnnnnnnnnnnnnnnnnnnnnnnnnnnnnnnnnnnnnnnnnnnnnnnnnnnnnnnnnnnnnnnnnnnnnnnnnnnnnnnnnnnnnnnnnnnnnnnnnnnnnnnnnnnnnnnnnnnnnnnnnnnnnnnnnnnnnnnnnnnnnnnnnnnnnnnnnnnnnnnnnnnnnnnnnnnnnnnnnnnnnnnnnnnnnnnnnnnnnnnnnnnnnnnnnnnnnnnnnnnnnnnnnnnnnnnnnnnnnnnnnnnnnnnnnnnnnnnnnnnnnnnnnnnnnnnnnnnnnnnnnnnnnnnnnnnnnnnnnnnnnnnnnnnnnnnnnnnnnnnnnnnnnnnnnnnnnnnnnnnnnnnnnnnnnnnnnnnnnnnnnnnnnnnnnnnnnnnnnnnnnnnnnnnnnnnnnnnnnnnnnnnnnnnnnnnnnnnnnnnnnnnnnnnnnnnnnnnnnnnnnnnnnnnnnnnnnnnnnnnnnnnnnnnnnnnnnnnnnnnnnnnnnnnnnnnnnnnnnnnnnnnnnnnnnnnnnnnnnnnnnnnnnnnnnnnnnnnnnnnnnnnnnnnnnnnnnnnnnnnnnnnnnnnnnnnnnnnnnnnnnnnnnnnnnnnnnnnnnnnnnnnnnnnnnnnnnnnnnnnnnnnnnnnnnnnnnnnnnnnnnnnnnnnnnnnnnnnnnnnnnnnnnnnnnnnnnnnnnnnnnnnnnnnnnnnnnnnnnnnnnnnnnnnnnnnnnnnnnnnnnnnnnnnnnnnnnnnnnnnnnnnnnnnnnnnnnnnnnnnnnnnnnnnnnnnnnnnnnnnnnnnnnnnnnnnnnnnnnnnnnnnnnnnnnnnnnnnnnnnnnnnnnnnnnnnnnnnnnnnnnnnnnnnnnnnnnnnnnnnnnnnnnnnnnnnnnnnnnnnnnnnnnnnnnnnnnnnnnnnnnnnnnnnnnnnnnnnnnnnnnnnnnnnnnnnnnnnnnnnnnnnnnnnnnnnnnnnnnnnnnnnnnnnnnnnnnnnnnnnnnnnnnnnnnnnnnnnnnnnnnnnnnnnnnnnnnnnnnnnnnnnnnnnnnnnnnnnnnnnnnnnnnnnnnnnnnnnnnnnnnnnnnnnnnnnnnnnnnnnnnnnnnnnnnnnnnnnnnnnnnnnnnnnnnnnnnnnnnnnnnnnnnnnnnnnnnnnnnnnnnnnnnnnnnnnnnnnnnnnnnnnnnnnnnnnnnnnnnnnnnnnnnnnnnnnnnnnnnnnnnnnnnnnnnnnnnnnnnnnnnnnnnnnnnnnnnnnnnnnnnnnnnnnnnnnnnnnnnnnnnnnnnnnnnnnnnnnnnnnnnnnnnnnnnnnnnnnnnnnnnnnnnnnnnnnnnnnnnnnnnnnnnnnnnnnnnnnnnnnnnnnnnnnnnnnnnnnnnnnnnnnnnnnnnnnnnnnnnnnnnnnnnnnnnnnnnnnnnnnnnnnnnnnnnnnnnnnnnnnnnnnnnnnnnnnnnnnnnnnnnnnnnnnnnnnnnnnnnnnnnnnnnnnnnnnnnnnnnnnnnnnnnnnnnnnnnnnnnnnnnnnnnnnnnnnnnnnnnnnnnnnnnnnnnnnnnnnnnnnnnnnnnnnnnnnnnnnnnnnnnnnnnnnnnnnnnnnnnnnnnnnnnnnnnnnnnnnnnnnnnnnnnnnnnnnnnnnnnnnnnnnnnnnnnnnnnnnnnnnnnnnnnnnnnnnnnnnnnnnnnnnnnnnnnnnnnnnnnnnnnnnnnnnnnnnnnnnnnnnnnnnnnnnnnnnnnnnnnnnnnnnnnnnnnnnnnnnnnnnnnnnnnnnnnnnnnnnnnnnnnnnnnnnnnnnnnnnnnnnnnnnnnnnnnnnnnnnnnnnnnnnnnnnnnnnnnnnnnnnnnnnnnnnnnnnnnnnnnnnnnnnnnnnnnnnnnnnnnnnnnnnnnnnnnnnnnnnnnnnnnnnnnnnnnnnnnnnnnnnnnnnnnnnnnnnnnnnnnnnnnnnnnnnnnnnnnnnnnnnnnnnnnnnnnnnnnnnnnnnnnnnnnnnnnnnnnnnnnnnnnnnnnnnnnnnnnnnnnnnnnnnnnnnnnnnnnnnnnnnnnnnnnnnnnnnnnnnnnnnnnnnnnnnnnnnnnnnnnnnnnnnnnnnnnnnnnnnnnnnnnnnnnnnnnnnnnnnnnnnnnnnnnnnnnnnnnnnnnnnnnnnnnnnnnnnnnnnnnnnnnnnnnnnnnnnnnnnnnnnnnnnnnnnnnnnnnnnnnnnnnnnnnnnnnnnnnnnnnnnnnnnnnnnnnnnnnnnnnnnnnnnnnnnnnnnnnnnnnnnnnnnnnnnnnnnnnnnnnnnnnnnnnnnnnnnnnnnnnnnnnnnnnnnnnnnnnnnnnnnnnnnnnnnnnnnnnnnnnnnnnnnnnnnnnnnnnnnnnnnnnnnnnnnnnnnnnnnnnnnnnnnnnnnnnnnnnnnnnnnnnnnnnnnnnnnnnnnnnnnnnnnnnnnnnnnnnnnnnnnnnnnnnnnnnnnnnnnnnnnnnnnnnnnnnnnnnnnnnnnnnnnnnnnnnnnnnnnnnnnnnnnnnnnnnnnnnnnnnnnnnnnnnnnnnnnnnnnnnnnnnnnnnnnnnnnnnnnnnnnnnnnnnnnnnnnnnnnnnnnnnnnnnnnnnnnnnnnnnnnnnnnnnnnnnnnnnnnnnnnnnnnnnnnnnnnnnnnnnnnnnnnnnnnnnnnnnnnnnnnnnnnnnnnnnnnnnnnnnnnnnnnnnnnnnnnnnnnnnnnnnnnnnnnnnnnnnnnnnnnnnnnnnnnnnnnnnnnnnnnnnnnnnnnnnnnnnnnnnnnnnnnnnnnnnnnnnnnnnnnnnnnnnnnnnnnnnnnnnnnnnnnnnnnnnnnnnnnnnnnnnnnnnnnnnnnnnnnnnnnnnnnnnnnnnnnnnnnnnnnnnnnnnnnnnnnnnnnnnnnnnnnnnnnnnnnnnnnnnnnnnnnnnnnnnnnnnnnnnnnnnnnnnnnnnnnnnnnnnnnnnnnnnnnnnnnnnnnnnnnnnnnnnnnnnnnnnnnnnnnnnnnnnnnnnnnnnnnnnnnnnnnnnnnnnnnnnnnnnnnnnnnnnnnnnnnnnnnnnnnnnnnnnnnnnnnnnnnnnnnnnnnnnnnnnnnnnnnnnnnnnnnnnnnnnnnnnnnnnnnnnnnnnnnnnnnnnnnnnnnnnnnnnnnnnnnnnnnnnnnnnnnnnnnnnnnnnnnnnnnnnnnnnnnnnnnnnnnnnnnnnnnnnnnnnnnnnnnnnnnnnnnnnnnnnnnnnnnnnnnnnnnnnnnnnnnnnnnnnnnnnnnnnnnnnnnnnnnnnnnnnnnnnnnnnnnnnnnnnnnnnnnnnnnnnnnnnnnnnnnnnnnnnnnnnnnnnnnnnnnnnnnnnnnnnnnnnnnnnnnnnnnnnnnnnnnnnnnnnnnnnnnnnnnnnnnnnnnnnnnnnnnnnnnnnnnnnnnnnnnnnnnnnnnnnnnnnnnnnnnnnnnnnnnnnnnnnnnnnnnnnnnnnnnnnnnnnnnnnnnnnnnnnnnnnnnnnnnnnnnnnnnnnnnnnnnnnnnnnnnnnnnnnnnnnnnnnnnnnnnnnnnnnnnnnnnnnnnnnnnnnnnnnnnnnnnnnnnnnnnnnnnnnnnnnnnnnnnnnnnnnnnnnnnnnnnnnnnnnnnnnnnnnnnnnnnnnnnnnnnnnnnnnnnnnnnnnnnnnnnnnnnnnnnnnnnnnnnnnnnnnnnnnnnnnnnnnnnnnnnnnnnnnnnnnnnnnnnnnnnnnnnnnnnnnnnnnnnnnnnnnnnnnnnnnnnnnnnnnnnnnnnnnnnnnnnnnnnnnnnnnnnnnnnnnnnnnnnnnnnnnnnnnnnnnnnnnnnnnnnnnnnnnnnnnnnnnnnnnnnnnnnnnnnnnnnnnnnnnnnnnnnnnnnnnnnnnnnnnnnnnnnnnnnnnnnnnnnnnnnnnnnnnnnnnnnnnnnnnnnnnnnnnnnnnnnnnnnnnnnnnnnnnnnnnnnnnnnnnnnnnnnnnnnnnnnnnnnnnnnnnnnnnnnnnnnnnnnnnnnnnnnnnnnnnnnnnnnnnnnnnnnnnnnnnnnnnnnnnnnnnnnnnnnnnnnnnnnnnnnnnnnnnnnnnnnnnnnnnnnnnnnnnnnnnnnnnnnnnnnnnnnnnnnnnnnnnnnnnnnnnnnnnnnnnnnnnnnnnnnnnnnnnnnnnnnnnnnnnnnnnnnnnnnnnnnnnnnnnnnnnnnnnnnnnnnnnnnnnnnnnnnnnnnnnnnnnnnnnnnnnnnnnnnnnnnnnnnnnnnnnnnnnnnnnnnnnnnnnnnnnnnnnnnnnnnnnnnnnnnnnnnnnnnnnnnnnnnnnnnnnnnnnnnnnnnnnnnnnnnnnnnnnnnnnnnnnnnnnnnnnnnnnnnnnnnnnnnnnnnnnnnnnnnnnnnnnnnnnnnnnnnnnnnnnnnnnnnnnnnnnnnnnnnnnnnnnnnnnnnnnnnnnnnnnnnnnnnnnnnnnnnnnnnnnnnnnnnnnnnnnnnnnnnnnnnnnnnnnnnnnnnnnnnnnnnnnnnnnnnnnnnnnnnnnnnnnnnnnnnnnnnnnnnnnnnnnnnnnnnnnnnnnnnnnnnnnnnnnnnnnnnnnnnnnnnnnnnnnnnnnnnnnnnnnnnnnnnnnnnnnnnnnnnnnnnnnnnnnnnnnnnnnnnnnnnnnnnnnnnnnnnnnnnnnnnnnnnnnnnnnnnnnnnnnnnnnnnnnnnnnnnnnnnnnnnnnnnnnnnnnnnnnnnnnnnnnnnnnnnnnnnnnnnnnnnnnnnnnnnnnnnnnnnnnnnnnnnnnnnnnnnnnnnnnnnnnnnnnnnnnnnnnnnnnnnnnnnnnnnnnnnnnnnnnnnnnnnnnnnnnnnnnnnnnnnnnnnnnnnnnnnnnnnnnnnnnnnnnnnnnnnnnnnnnnnnnnnnnnnnnnnnnnnnnnnnnnnnnnnnnnnnnnnnnnnnnnnnnnnnnnnnnnnnnnnnnnnnnnnnnnnnnnnnnnnnnnnnnnnnnnnnnnnnnnnnnnnnnnnnnnnnnnnnnnnnnnnnnnnnnnnnnnnnnnnnnnnnnnnnnnnnnnnnnnnnnnnnnnnnnnnnnnnnnnnnnnnnnnnnnnnnnnnnnnnnnnnnnnnnnnnnnnnnnnnnnnnnnnnnnnnnnnnnnnnnnnnnnnnnnnnnnnnnnnnnnnnnnnnnnnnnnnnnnnnnnnnnnnnnnnnnnnnnnnnnnnnnnnnnnnnnnnnnnnnnnnnnnnnnnnnnnnnnnnnnnnnnnnnnnnnnnnnnnnnnnnnnnnnnnnnnnnnnnnnnnnnnnnnnnnnnnnnnnnnnnnnnnnnnnnnnnnnnnnnnnnnnnnnnnnnnnnnnnnnnnnnnnnnnnnnnnnnnnnnnnnnnnnnnnnnnnnnnnnnnnnnnnnnnnnnnnnnnnnnnnnnnnnnnnnnnnnnnnnnnnnnnnnnnnnnnnnnnnnnnnnnnnnnnnnnnnnnnnnnnnnnnnnnnnnnnnnnnnnnnnnnnnnnnnnnnnnnnnnnnnnnnnnnnnnnnnnnnnnnnnnnnnnnnnnnnnnnnnnnnnnnnnnnnnnnnnnnnnnnnnnnnnnnnnnnnnnnnnnnnnnnnnnnnnnnnnnnnnnnnnnnnnnnnnnnnnnnnnnnnnnnnnnnnnnnnnnnnnnnnnnnnnnnnnnnnnnnnnnnnnnnnnnnnnnnnnnnnnnnnnnnnnnnnnnnnnnnnnnnnnnnnnnnnnnnnnnnnnnnnnnnnnnnnnnnnnnnnnnnnnnnnnnnnnnnnnnnnnnnnnnnnnnnnnnnnnnnnnnnnnnnnnnnnnnnnnnnnnnnnnnnnnnnnnnnnnnnnnnnnnnnnnnnnnnnnnnnnnnnnnnnnnnnnnnnnnnnnnnnnnnnnnnnnnnnnnnnnnnnnnnnnnnnnnnnnnnnnnnnnnnnnnnnnnnnnnnnnnnnnnnnnnnnnnnnnnnnnnnnnnnnnnnnnnnnnnnnnnnnnnnnnnnnnnnnnnnnnnnnnnnnnnnnnnnnnnnnnnnnnnnnnnnnnnnnnnnnnnnnnnnnnnnnnnnnnnnnnnnnnnnnnnnnnnnnnnnnnnnnnnnnnnnnnnnnnnnnnnnnnnnnnnnnnnnnnnnnnnnnnnnnnnnnnnnnnnnnnnnnnnnnnnnnnnnnnnnnnnnnnnnnnnnnnnnnnnnnnnnnnnnnnnnnnnnnnnnnnnnnnnnnnnnnnnnnnnnnnnnnnnnnnnnnnnnnnnnnnnnnnnnnnnnnnnnnnnnnnnnnnnnnnnnnnnnnnnnnnnnnnnnnnnnnnnnnnnnnnnnnnnnnnnnnnnnnnnnnnnnnnnnnnnnnnnnnnnnnnnnnnnnnnnnnnnnnnnnnnnnnnnnnnnnnnnnnnnnnnnnnnnnnnnnnnnnnnnnnnnnnnnnnnnnnnnnnnnnnnnnnnnnnnnnnnnnnnnnnnnnnnnnnnnnnnnnnnnnnnnnnnnnnnnnnnnnnnnnnnnnnnnnnnnnnnnnnnnnnnnnnnnnnnnnnnnnnnnnnnnnnnnnnnnnnnnnnnnnnnnnnnnnnnnnnnnnnnnnnnnnnnnnnnnnnnnnnnnnnnnnnnnnnnnnnnnnnnnnnnnnnnnnnnnnnnnnnnnnnnnnnnnnnnnnnnnnnnnnnnnnnnnnnnnnnnnnnnnnnnnnnnnnnnnnnnnnnnnnnnnnnnnnnnnnnnnnnnnnnnnnnnnnnnnnnnnnnnnnnnnnnnnnnnnnnnnnnnnnnnnnnnnnnnnnnnnnnnnnnnnnnnnnnnnnnnnnnnnnnnnnnnnnnnnnnnnnnnnnnnnnnnnnnnnnnnnnnnnnnnnnnnnnnnnnnnnnnnnnnnnnnnnnnnnnnnnnnnnnnnnnnnnnnnnnnnnnnnnnnnnnnnnnnnnnnnnnnnnnnnnnnnnnnnnnnnnnnnnnnnnnnnnnnnnnnnnnnnnnnnnnnnnnnnnnnnnnnnnnnnnnnnnnnnnnnnnnnnnnnnnnnnnnnnnnnnnnnnnnnnnnnnnnnnnnnnnnnnnnnnnnnnnnnnnnnnnnnnnnnnnnnnnnnnnnnnnnnnnnnnnnnnnnnnnnnnnnnnnnnnnnnnnnnnnnnnnnnnnnnnnnnnnnnnnnnnnnnnnnnnnnnnnnnnnnnnnnnnnnnnnnnnnnnnnnnnnnnnnnnnnnnnnnnnnnnnnnnnnnnnnnnnnnnnnnnnnnnnnnnnnnnnnnnnnnnnnnnnnnnnnnnnnnnnnnnnnnnnnnnnnnnnnnnnnnnnnnnnnnnnnnnnnnnnnnnnnnnnnnnnnnnnnnnnnnnnnnnnnnnnnnnnnnnnnnnnnnnnnnnnnnnnnnnnnnnnnnnnnnnnnnnnnnnnnnnnnnnnnnnnnnnnnnnnnnnnnnnnnnnnnnnnnnnnnnnnnnnnnnnnnnnnnnnnnnnnnnnnnnnnnnnnnnnnnnnnnnnnnnnnnnnnnnnnnnnnnnnnnnnnnnnnnnnnnnnnnnnnnnnnnnnnnnnnnnnnnnnnnnnnnnnnnnnnnnnnnnnnnnnnnnnnnnnnnnnnnnnnnnnnnnnnnnnnnnnnnnnnnnnnnnnnnnnnnnnnnnnnnnnnnnnnnnnnnnnnnnnnnnnnnnnnnnnnnnnnnnnnnnnnnnnnnnnnnnnnnnnnnnnnnnnnnnnnnnnnnnnnnnnnnnnnnnnnnnnnnnnnnnnnnnnnnnnnnnnnnnnnnnnnnnnnnnnnnnnnnnnnnnnnnnnnnnnnnnnnnnnnnnnnnnnnnnnnnnnnnnnnnnnnnnnnnnnnnnnnnnnnnnnnnnnnnnnnnnnnnnnnnnnnnnnnnnnnnnnnnnnnnnnnnnnnnnnnnnnnnnnnnnnnnnnnnnnnnnnnnnnnnnnnnnnnnnnnnnnnnnnnnnnnnnnnnnnnnnnnnnnnnnnnnnnnnnnnnnnnnnnnnnnnnnnnnnnnnnnnnnnnnnnnnnnnnnnnnnnnnnnnnnnnnnnnnnnnnnnnnnnnnnnnnnnnnnnnnnnnnnnnnnnnnnnnnnnnnnnnnnnnnnnnnnnnnnnnnnnnnnnnnnnnnnnnnnnnnnnnnnnnnnnnnnnnnnnnnnnnnnnnnnnnnnnnnnnnnnnnnnnnnnnnnnnnnnnnnnnnnnnnnnnnnnnnnnnnnnnnnnnnnnnnnnnnnnnnnnnnnnnnnnnnnnnnnnnnnnnnnnnnnnnnnnnnnnnnnnnnnnnnnnnnnnnnnnnnnnnnnnnnnnnnnnnnnnnnnnnnnnnnnnnnnnnnnnnnnnnnnnnnnnnnnnnnnnnnnnnnnnnnnnnnnnnnnnnnnnnnnnnnnnnnnnnnnnnnnnnnnnnnnnnnnnnnnnnnnnnnnnnnnnnnnnnnnnnnnnnnnnnnnnnnnnnnnnnnnnnnnnnnnnnnnnnnnnnnnnnnnnnnnnnnnnnnnnnnnnnnnnnnnnnnnnnnnnnnnnnnnnnnnnnnnnnnnnnnnnnnnnnnnnnnnnnnnnnnnnnnnnnnnnnnnnnnnnnnnnnnnnnnnnnnnnnnnnnnnnnnnnnnnnnnnnnnnnnnnnnnnnnnnnnnnnnnnnnnnnnnnnnnnnnnnnnnnnnnnnnnnnnnnnnnnnnnnnnnnnnnnnnnnnnnnnnnnnnnnnnnnnnnnnnnnnnnnnnnnnnnnnnnnnnnnnnnnnnnnnnnnnnnnnnnnnnnnnnnnnnnnnnnnnnnnnnnnnnnnnnnnnnnnnnnnnnnnnnnnnnnnnnnnnnnnnnnnnnnnnnnnnnnnnnnnnnnnnnnnnnnnnnnnnnnnnnnnnnnnnnnnnnnnnnnnnnnnnnnnnnnnnnnnnnnnnnnnnnnnnnnnnnnnnnnnnnnnnnnnnnnnnnnnnnnnnnnnnnnnnnnnnnnnnnnnnnnnnnnnnnnnnnnnnnnnnnnnnnnnnnnnnnnnnnnnnnnnnnnnnnnnnnnnnnnnnnnnnnnnnnnnnnnnnnnnnnnnnnnnnnnnnnnnnnnnnnnnnnnnnnnnnnnnnnnnnnnnnnnnnnnnnnnnnnnnnnnnnnnnnnnnnnnnnnnnnnnnnnnnnnnnnnnnnnnnnnnnnnnnnnnnnnnnnnnnnnnnnnnnnnnnnnnnnnnnnnnnnnnnnnnnnnnnnnnnnnnnnnnnnnnnnnnnnnnnnnnnnnnnnnnnnnnnnnnnnnnnnnnnnnnnnnnnnnnnnnnnnnnnnnnnnnnnnnnnnnnnnnnnnnnnnnnnnnnnnnnnnnnnnnnnnnnnnnnnnnnnnnnnnnnnnnnnnnnnnnnnnnnnnnnnnnnnnnnnnnnnnnnnnnnnnnnnnnnnnnnnnnnnnnnnnnnnnnnnnnnnnnnnnnnnnnnnnnnnnnnnnnnnnnnnnnnnnnnnnnnnnnnnnnnnnnnnnnnnnnnnnnnnnnnnnnnnnnnnnnnnnnnnnnnnnnnnnnnnnnnnnnnnnnnnnnnnnnnnnnnnnnnnnnnnnnnnnnnnnnnnnnnnnnnnnnnnnnnnnnnnnnnnnnnnnnnnnnnnnnnnnnnnnnnnnnnnnnnnnnnnnnnnnnnnnnnnnnnnnnnnnnnnnnnnnnnnnnnnnnnnnnnnnnnnnnnnnnnnnnnnnnnnnnnnnnnnnnnnnnnnnnnnnnnnnnnnnnnnnnnnnnnnnnnnnnnnnnnnnnnnnnnnnnnnnnnnnnnnnnnnnnnnnnnnnnnnnnnnnnnnnnnnnnnnnnnnnnnnnnnnnnnnnnnnnnnnnnnnnnnnnnnnnnnnnnnnnnnnnnnnnnnnnnnnnnnnnnnnnnnnnnnnnnnnnnnnnnnnnnnnnnnnnnnnnnnnnnnnnnnnnnnnnnnnnnnnnnnnnnnnnnnnnnnnnnnnnnnnnnnnnnnnnnnnnnnnnnnnnnnnnnnnnnnnnnnnnnnnnnnnnnnnnnnnnnnnnnnnnnnnnnnnnnnnnnnnnnnnnnnnnnnnnnnnnnnnnnnnnnnnnnnnnnnnnnnnnnnnnnnnnnnnnnnnnnnnnnnnnnnnnnnnnnnnnnnnnnnnnnnnnnnnnnnnnnnnnnnnnnnnnnnnnnnnnnnnnnnnnnnnnnnnnnnnnnnnnnnnnnnnnnnnnnnnnnnnnnnnnnnnnnnnnnnnnnnnnnnnnnnnnnnnnnnnnnnnnnnnnnnnnnnnnnnnnnnnnnnnnnnnnnnnnnnnnnnnnnnnnnnnnnnnnnnnnnnnnnnnnnnnnnnnnnnnnnnnnnnnnnnnnnnnnnnnnnnnnnnnnnnnnnnnnnnnnnnnnnnnnnnnnnnnnnnnnnnnnnnnnnnnnnnnnnnnnnnnnnnnnnnnnnnnnnnnnnnnnnnnnnnnnnnnnnnnnnnnnnnnnnnnnnnnnnnnnnnnnnnnnnnnnnnnnnnnnnnnnnnnnnnnnnnnnnnnnnnnnnnnnnnnnnnnnnnnnnnnnnnnnnnnnnnnnnnnnnnnnnnnnnnnnnnnnnnnnnnnnnnnnnnnnnnnnnnnnnnnnnnnnnnnnnnnnnnnnnnnnnnnnnnnnnnnnnnnnnnnnnnnnnnnnnnnnnnnnnnnnnnnnnnnnnnnnnnnnnnnnnnnnnnnnnnnnnnnnnnnnnnnnnnnnnnnnnnnnnnnnnnnnnnnnnnnnnnnnnnnnnnnnnnnnnnnnnnnnnnnnnnnnnnnnnnnnnnnnnnnnnnnnnnnnnnnnnnnnnnnnnnnnnnnnnnnnnnnnnnnnnnnnnnnnnnnnnnnnnnnnnnnnnnnnnnnnnnnnnnnnnnnnnnnnnnnnnnnnnnnnnnnnnnnnnnnnnnnnnnnnnnnnnnnnnnnnnnnnnnnnnnnnnnnnnnnnnnnnnnnnnnnnnnnnnnnnnnnnnnnnnnnnnnnnnnnnnnnnnnnnnnnnnnnnnnnnnnnnnnnnnnnnnnnnnnnnnnnnnnnnnnnnnnnnnnnnnnnnnnnnnnnnnnnnnnnnnnnnnnnnnnnnnnnnnnnnnnnnnnnnnnnnnnnnnnnnnnnnnnnnnnnnnnnnnnnnnnnnnnnnnnnnnnnnnnnnnnnnnnnnnnnnnnnnnnnnnnnnnnnnnnnnnnnnnnnnnnnnnnnnnnnnnnnnnnnnnnnnnnnnnnnnnnnnnnnnnnnnnnnnnnnnnnnnnnnnnnnnnnnnnnnnnnnnnnnnnnnnnnnnnnnnnnnnnnnnnnnnnnnnnnnnnnnnnnnnnnnnnnnnnnnnnnnnnnnnnnnnnnnnnnnnnnnnnnnnnnnnnnnnnnnnnnnnnnnnnnnnnnnnnnnnnnnnnnnnnnnnnnnnnnnnnnnnnnnnnnnnnnnnnnnnnnnnnnnnnnnnnnnnnnnnnnnnnnnnnnnnnnnnnnnnnnnnnnnnnnnnnnnnnnnnnnnnnnnnnnnnnnnnnnnnnnnnnnnnnnnnnnnnnnnnnnnnnnnnnnnnnnnnnnnnnnnnnnnnnnnnnnnnnnnnnnnnnnnnnnnnnnnnnnnnnnnnnnnnnnnnnnnnnnnnnnnnnnnnnnnnnnnnnnnnnnnnnnnnnnnnnnnnnnnnnnnnnnnnnnnnnnnnnnnnnnnnnnnnnnnnnnnnnnnnnnnnnnnnnnnnnnnnnnnnnnnnnnnnnnnnnnnnnnnnnnnnnnnnnnnnnnnnnnnnnnnnnnnnnnnnnnnnnnnnnnnnnnnnnnnnnnnnnnnnnnnnnnnnnnnnnnnnnnnnnnnnnnnnnnnnnnnnnnnnnnnnnnnnnnnnnnnnnnnnnnnnnnnnnnnnnnnnnnnnnnnnnnnnnnnnnnnnnnnnnnnnnnnnnnnnnnnnnnnnnnnnnnnnnnnnnnnnnnnnnnnnnnnnnnnnnnnnnnnnnnnnnnnnnnnnnnnnnnnnnnnnnnnnnnnnnnnnnnnnnnnnnnnnnnnnnnnnnnnnnnnnnnnnnnnnnnnnnnnnnnnnnnnnnnnnnnnnnnnnnnnnnnnnnnnnnnnnnnnnnnnnnnnnnnnnnnnnnnnnnnnnnnnnnnnnnnnnnnnnnnnnnnnnnnnnnnnnnnnnnnnnnnnnnnnnnnnnnnnnnnnnnnnnnnnnnnnnnnnnnnnnnnnnnnnnnnnnnnnnnnnnnnnnnnnnnnnnnnnnnnnnnnnnnnnnnnnnnnnnnnnnnnnnnnnnnnnnnnnnnnnnnnnnnnnnnnnnnnnnnnnnnnnnnnnnnnnnnnnnnnnnnnnnnnnnnnnnnnnnnnnnnnnnnnnnnnnnnnnnnnnnnnnnnnnnnnnnnnnnnnnnnnnnnnnnnnnnnnnnnnnnnnnnnnnnnnnnnnnnnnnnnnnnnnnnnnnnnnnnnnnnnnnnnnnnnnnnnnnnnnnnnnnnnnnnnnnnnnnnnnnnnnnnnnnnnnnnnnnnnnnnnnnnnnnnnnnnnnnnnnnnnnnnnnnnnnnnnnnnnnnnnnnnnnnnnnnnnnnnnnnnnnnnnnnnnnnnnnnnnnnnnnnnnnnnnnnnnnnnnnnnnnnnnnnnnnnnnnnnnnnnnnnnnnnnnnnnnnnnnnnnnnnnnnnnnnnnnnnnnnnnnnnnnnnnnnnnnnnnnnnnnnnnnnnnnnnnnnnnnnnnnnnnnnnnnnnnnnnnnnnnnnnnnnnnnnnnnnnnnnnnnnnnnnnnnnnnnnnnnnnnnnnnnnnnnnnnnnnnnnnnnnnnnnnnnnnnnnnnnnnnnnnnnnnnnnnnnnnnnnnnnnnnnnnnnnnnnnnnnnnnnnnnnnnnnnnnnnnnnnnnnnnnnnnnnnnnnnnnnnnnnnnnnnnnnnnnnnnnnnnnnnnnnnnnnnnnnnnnnnnnnnnnnnnnnnnnnnnnnnnnnnnnnnnnnnnnnnnnnnnnnnnnnnnnnnnnnnnnnnnnnnnnnnnnnnnnnnnnnnnnnnnnnnnnnnnnnnnnnnnnnnnnnnnnnnnnnnnnnnnnnnnnnnnnnnnnnnnnnnnnnnnnnnnnnnnnnnnnnnnnnnnnnnnnnnnnnnnnnnnnnnnnnnnnnnnnnnnnnnnnnnnnnnnnnnnnnnnnnnnnnnnnnnnnnnnnnnnnnnnnnnnnnnnnnnnnnnnnnnnnnnnnnnnnnnnnnnnnnnnnnnnnnnnnnnnnnnnnnnnnnnnnnnnnnnnnnnnnnnnnnnnnnnnnnnnnnnnnnnnnnnnnnnnnnnnnnnnnnnnnnnnnnnnnnnnnnnnnnnnnnnnnnnnnnnnnnnnnnnnnnnnnnnnnnnnnnnnnnnnnnnnnnnnnnnnnnnnnnnnnnnnnnnnnnnnnnnnnnnnnnnnnnnnnnnnnnnnnnnnnnnnnnnnnnnnnnnnnnnnnnnnnnnnnnnnnnnnnnnnnnnnnnnnnnnnnnnnnnnnnnnnnnnnnnnnnnnnnnnnnnnnnnnnnnnnnnnnnnnnnnnnnnnnnnnnnnnnnnnnnnnnnnnnnnnnnnnnnnnnnnnnnnnnnnnnnnnnnnnnnnnnnnnnnnnnnnnnnnnnnnnnnnnnnnnnnnnnnnnnnnnnnnnnnnnnnnnnnnnnnnnnnnnnnnnnnnnnnnnnnnnnnnnnnnnnnnnnnnnnnnnnnnnnnnnnnnnnnnnnnnnnnnnnnnnnnnnnnnnnnnnnnnnnnnnnnnnnnnnnnnnnnnnnnnnnnnnnnnnnnnnnnnnnnnnnnnnnnnnnnnnnnnnnnnnnnnnnnnnnnnnnnnnnnnnnnnnnnnnnnnnnnnnnnnnnnnnnnnnnnnnnnnnnnnnnnnnnnnnnnnnnnnnnnnnnnnnnnnnnnnnnnnnnnnnnnnnnnnnnnnnnnnnnnnnnnnnnnnnnnnnnnnnnnnnnnnnnnnnnnnnnnnnnnnnnnnnnnnnnnnnnnnnnnnnnnnnnnnnnnnnnnnnnnnnnnnnnnnnnnnnnnnnnnnnnnnnnnnnnnnnnnnnnnnnnnnnnnnnnnnnnnnnnnnnnnnnnnnnnnnnnnnnnnnnnnnnnnnnnnnnnnnnnnnnnnnnnnnnnnnnnnnnnnnnnnnnnnnnnnnnnnnnnnnnnnnnnnnnnnnnnnnnnnnnnnnnnnnnnnnnnnnnnnnnnnnnnnnnnnnnnnnnnnnnnnnnnnnnnnnnnnnnnnnnnnnnnnnnnnnnnnnnnnnnnnnnnnnnnnnnnnnnnnnnnnnnnnnnnnnnnnnnnnnnnnnnnnnnnnnnnnnnnnnnnnnnnnnnnnnnnnnnnnnnnnnnnnnnnnnnnnnnnnnnnnnnnnnnnnnnnnnnnnnnnnnnnnnnnnnnnnnnnnnnnnnnnnnnnnnnnnnnnnnnnnnnnnnnnnnnnnnnnnnnnnnnnnnnnnnnnnnnnnnnnnnnnnnnnnnnnnnnnnnnnnnnnnnnnnnnnnnnnnnnnnnnnnnnnnnnnnnnnnnnnnnnnnnnnnnnnnnnnnnnnnnnnnnnnnnnnnnnnnnnnnnnnnnnnnnnnnnnnnnnnnnnnnnnnnnnnnnnnnnnnnnnnnnnnnnnnnnnnnnnnnnnnnnnnnnnnnnnnnnnnnnnnnnnnnnnnnnnnnnnnnnnnnnnnnnnnnnnnnnnnnnnnnnnnnnnnnnnnnnnnnnnnnnnnnnnnnnnnnnnnnnnnnnnnnnnnnnnnnnnnnnnnnnnnnnnnnnnnnnnnnnnnnnnnnnnnnnnnnnnnnnnnnnnnnnnnnnnnnnnnnnnnnnnnnnnnnnnnnnnnnnnnnnnnnnnnnnnnnnnnnnnnnnnnnnnnnnnnnnnnnnnnnnnnnnnnnnnnnnnnnnnnnnnnnnnnnnnnnnnnnnnnnnnnnnnnnnnnnnnnnnnnnnnnnnnnnnnnnnnnnnnnnnnnnnnnnnnnnnnnnnnnnnnnnnnnnnnnnnnnnnnnnnnnnnnnnnnnnnnnnnnnnnnnnnnnnnnnnnnnnnnnnnnnnnnnnnnnnnnnnnnnnnnnnnnnnnnnnnnnnnnnnnnnnnnnnnnnnnnnnnnnnnnnnnnnnnnnnnnnnnnnnnnnnnnnnnnnnnnnnnnnnnnnnnnnnnnnnnnnnnnnnnnnnnnnnnnnnnnnnnnnnnnnnnnnnnnnnnnnnnnnnnnnnnnnnnnnnnnnnnnnnnnnnnnnnnnnnnnnnnnnnnnnnnnnnnnnnnnnnnnnnnnnnnnnnnnnnnnnnnnnnnnnnnnnnnnnnnnnnnnnnnnnnnnnnnnnnnnnnnnnnnnnnnnnnnnnnnnnnnnnnnnnnnnnnnnnnnnnnnnnnnnnnnnnnnnnnnnnnnnnnnnnnnnnnnnnnnnnnnnnnnnnnnnnnnnnnnnnnnnnnnnnnnnnnnnnnnnnnnnnnnnnnnnnnnnnnnnnnnnnnnnnnnnnnnnnnnnnnnnnnnnnnnnnnnnnnnnnnnnnnnnnnnnnnnnnnnnnnnnnnnnnnnnnnnnnnnnnnnnnnnnnnnnnnnnnnnnnnnnnnnnnnnnnnnnnnnnnnnnnnnnnnnnnnnnnnnnnnnnnnnnnnnnnnnnnnnnnnnnnnnnnnnnnnnnnnnnnnnnnnnnnnnnnnnnnnnnnnnnnnnnnnnnnnnnnnnnnnnnnnnnnnnnnnnnnnnnnnnnnnnnnnnnnnnnnnnnnnnnnnnnnnnnnnnnnnnnnnnnnnnnnnnnnnnnnnnnnnnnnnnnnnnnnnnnnnnnnnnnnnnnnnnnnnnnnnnnnnnnnnnnnnnnnnnnnnnnnnnnnnnnnnnnnnnnnnnnnnnnnnnnnnnnnnnnnnnnnnnnnnnnnnnnnnnnnnnnnnnnnnnnnnnnnnnnnnnnnnnnnnnnnnnnnnnnnnnnnnnnnnnnnnnnnnnnnnnnnnnnnnnnnnnnnnnnnnnnnnnnnnnnnnnnnnnnnnnnnnnnnnnnnnnnnnnnnnnnnnnnnnnnnnnnnnnnnnnnnnnnnnnnnnnnnnnnnnnnnnnnnnnnnnnnnnnnnnnnnnnnnnnnnnnnnnnnnnnnnnnnnnnnnnnnnnnnnnnnnnnnnnnnnnnnnnnnnnnnnnnnnnnnnnnnnnnnnnnnnnnnnnnnnnnnnnnnnnnnnnnnnnnnnnnnnnnnnnnnnnnnnnnnnnnnnnnnnnnnnnnnnnnnnnnnnnnnnnnnnnnnnnnnnnnnnnnnnnnnnnnnnnnnnnnnnnnnnnnnnnnnnnnnnnnnnnnnnnnnnnnnnnnnnnnnnnnnnnnnnnnnnnnnnnnnnnnnnnnnnnnnnnnnnnnnnnnnnnnnnnnnnnnnnnnnnnnnnnnnnnnnnnnnnnnnnnnnnnnnnnnnnnnnnnnnnnnnnnnnnnnnnnnnnnnnnnnnnnnnnnnnnnnnnnnnnnnnnnnnnnnnnnnnnnnnnnnnnnnnnnnnnnnnnnnnnnnnnnnnnnnnnnnnnnnnnnnnnnnnnnnnnnnnnnnnnnnnnnnnnnnnnnnnnnnnnnnnnnnnnnnnnnnnnnnnnnnnnnnnnnnnnnnnnnnnnnnnnnnnnnnnnnnnnnnnnnnnnnnnnnnnnnnnnnnnnnnnnnnnnnnnnnnnnnnnnnnnnnnnnnnnnnnnnnnnnnnnnnnnnnnnnnnnnnnnnnnnnnnnnnnnnnnnnnnnnnnnnnnnnnnnnnnnnnnnnnnnnnnnnnnnnnnnnnnnnnnnnnnnnnnnnnnnnnnnnnnnnnnnnnnnnnnnnnnnnnnnnnnnnnnnnnnnnnnnnnnnnnnnnnnnnnnnnnnnnnnnnnnnnnnnnnnnnnnnnnnnnnnnnnnnnnnnnnnnnnnnnnnnnnnnnnnnnnnnnnnnnnnnnnnnnnnnnnnnnnnnnnnnnnnnnnnnnnnnnnnnnnnnnnnnnnnnnnnnnnnnnnnnnnnnnnnnnnnnnnnnnnnnnnnnnnnnnnnnnnnnnnnnnnnnnnnnnnnnnnnnnnnnnnnnnnnnnnnnnnnnnnnnnnnnnnnnnnnnnnnnnnnnnnnnnnnnnnnnnnnnnnnnnnnnnnnnnnnnnnnnnnnnnnnnnnnnnnnnnnnnnnnnnnnnnnnnnnnnnnnnnnnnnnnnnnnnnnnnnnnnnnnnnnnnnnnnnnnnnnnnnnnnnnnnnnnnnnnnnnnnnnnnnnnnnnnnnnnnnnnnnnnnnnnnnnnnnnnnnnnnnnnnnnnnnnnnnnnnnnnnnnnnnnnnnnnnnnnnnnnnnnnnnnnnnnnnnnnnnnnnnnnnnnnnnnnnnnnnnnnnnnnnnnnnnnnnnnnnnnnnnnnnnnnnnnnnnnnnnnnnnnnnnnnnnnnnnnnnnnnnnnnnnnnnnnnnnnnnnnnnnnnnnnnnnnnnnnnnnnnnnnnnnnnnnnnnnnnnnnnnnnnnnnnnnnnnnnnnnnnnnnnnnnnnnnnnnnnnnnnnnnnnnnnnnnnnnnnnnnnnnnnnnnnnnnnnnnnnnnnnnnnnnnnnnnnnnnnnnnnnnnnnnnnnnnnnnnnnnnnnnnnnnnnnnnnnnnnnnnnnnnnnnnnnnnnnnnnnnnnnnnnnnnnnnnnnnnnnnnnnnnnnnnnnnnnnnnnnnnnnnnnnnnnnnnnnnnnnnnnnnnnnnnnnnnnnnnnnnnnnnnnnnnnnnnnnnnnnnnnnnnnnnnnnnnnnnnnnnnnnnnnnnnnnnnnnnnnnnnnnnnnnnnnnnnnnnnnnnnnnnnnnnnnnnnnnnnnnnnnnnnnnnnnnnnnnnnnnnnnnnnnnnnnnnnnnnnnnnnnnnnnnnnnnnnnnnnnnnnnnnnnnnnnnnnnnnnnnnnnnnnnnnnnnnnnnnnnnnnnnnnnnnnnnnnnnnnnnnnnnnnnnnnnnnnnnnnnnnnnnnnnnnnnnnnnnnnnnnnnnnnnnnnnnnnnnnnnnnnnnnnnnnnnnnnnnnnnnnnnnnnnnnnnnnnnnnnnnnnnnnnnnnnnnnnnnnnnnnnnnnnnnnnnnnnnnnnnnnnnnnnnnnnnnnnnnnnnnnnnnnnnnnnnnnnnnnnnnnnnnnnnnnnnnnnnnnnnnnnnnnnnnnnnnnnnnnnnnnnnnnnnnnnnnnnnnnnnnnnnnnnnnnnnnnnnnnnnnnnnnnnnnnnnnnnnnnnnnnnnnnnnnnnnnnnnnnnnnnnnnnnnnnnnnnnnnnnnnnnnnnnnnnnnnnnnnnnnnnnnnnnnnnnnnnnnnnnnnnnnnnnnnnnnnnnnnnnnnnnnnnnnnnnnnnnnnnnnnnnnnnnnnnnnnnnnnnnnnnnnnnnnnnnnnnnnnnnnnnnnnnnnnnnnnnnnnnnnnnnnnnnnnnnnnnnnnnnnnnnnnnnnnnnnnnnnnnnnnnnnnnnnnnnnnnnnnnnnnnnnnnnnnnnnnnnnnnnnnnnnnnnnnnnnnnnnnnnnnnnnnnnnnnnnnnnnnnnnnnnnnnnnnnnnnnnnnnnnnnnnnnnnnnnnnnnnnnnnnnnnnnnnnnnnnnnnnnnnnnnnnnnnnnnnnnnnnnnnnnnnnnnnnnnnnnnnnnnnnnnnnnnnnnnnnnnnnnnnnnnnnnnnnnnnnnnnnnnnnnnnnnnnnnnnnnnnnnnnnnnnnnnnnnnnnnnnnnnnnnnnnnnnnnnnnnnnnnnnnnnnnnnnnnnnnnnnnnnnnnnnnnnnnnnnnnnnnnnnnnnnnnnnnnnnnnnnnnnnnnnnnnnnnnnnnnnnnnnnnnnnnnnnnnnnnnnnnnnnnnnnnnnnnnnnnnnnnnnnnnnnnnnnnnnnnnnnnnnnnnnnnnnnnnnnnnnnnnnnnnnnnnnnnnnnnnnnnnnnnnnnnnnnnnnnnnnnnnnnnnnnnnnnnnnnnnnnnnnnnnnnnnnnnnnnnnnnnnnnnnnnnnnnnnnnnnnnnnnnnnnnnnnnnnnnnnnnnnnnnnnnnnnnnnnnnnnnnnnnnnnnnnnnnnnnnnnnnnnnnnnnnnnnnnnnnnnnnnnnnnnnnnnnnnnnnnnnnnnnnnnnnnnnnnnnnnnnnnnnnnnnnnnnnnnnnnnnnnnnnnnnnnnnnnnnnnnnnnnnnnnnnnnnnnnnnnnnnnnnnnnnnnnnnnnnnnnnnnnnnnnnnnnnnnnnnnnnnnnnnnnnnnnnnnnnnnnnnnnnnnnnnnnnnnnnnnnnnnnnnnnnnnnnnnnnnnnnnnnnnnnnnnnnnnnnnnnnnnnnnnnnnnnnnnnnnnnnnnnnnnnnnnnnnnnnnnnnnnnnnnnnnnnnnnnnnnnnnnnnnnnnnnnnnnnnnnnnnnnnnnnnnnnnnnnnnnnnnnnnnnnnnnnnnnnnnnnnnnnnnnnnnnnnnnnnnnnnnnnnnnnnnnnnnnnnnnnnnnnnnnnnnnnnnnnnnnnnnnnnnnnnnnnnnnnnnnnnnnnnnnnnnnnnnnnnnnnnnnnnnnnnnnnnnnnnnnnnnnnnnnnnnnnnnnnnnnnnnnnnnnnnnnnnnnnnnnnnnnnnnnnnnnnnnnnnnnnnnnnnnnnnnnnnnnnnnnnnnnnnnnnnnnnnnnnnnnnnnnnnnnnnnnnnnnnnnnnnnnnnnnnnnnnnnnnnnnnnnnnnnnnnnnnnnnnnnnnnnnnnnnnnnnnnnnnnnnnnnnnnnnnnnnnnnnnnnnnnnnnnnnnnnnnnnnnnnnnnnnnnnnnnnnnnnnnnnnnnnnnnnnnnnnnnnnnnnnnnnnnnnnnnnnnnnnnnnnnnnnnnnnnnnnnnnnnnnnnnnnnnnnnnnnnnnnnnnnnnnnnnnnnnnnnnnnnnnnnnnnnnnnnnnnnnnnnnnnnnnnnnnnnnnnnnnnnnnnnnnnnnnnnnnnnnnnnnnnnnnnnnnnnnnnnnnnnnnnnnnnnnnnnnnnnnnnnnnnnnnnnnnnnnnnnnnnnnnnnnnnnnnnnnnnnnnnnnnnnnnnnnnnnnnnnnnnnnnnnnnnnnnnnnnnnnnnnnnnnnnnnnnnnnnnnnnnnnnnnnnnnnnnnnnnnnnnnnnnnnnnnnnnnnnnnnnnnnnnnnnnnnnnnnnnnnnnnnnnnnnnnnnnnnnnnnnnnnnnnnnnnnnnnnnnnnnnnnnnnnnnnnnnnnnnnnnnnnnnnnnnnnnnnnnnnnnnnnnnnnnnnnnnnnnnnnnnnnnnnnnnnnnnnnnnnnnnnnnnnnnnnnnnnnnnnnnnnnnnnnnnnnnnnnnnnnnnnnnnnnnnnnnnnnnnnnnnnnnnnnnnnnnnnnnnnnnnnnnnnnnnnnnnnnnnnnnnnnnnnnnnnnnnnnnnnnnnnnnnnnnnnnnnnnnnnnnnnnnnnnnnnnnnnnnnnnnnnnnnnnnnnnnnnnnnnnnnnnnnnnnnnnnnnnnnnnnnnnnnnnnnnnnnnnnnnnnnnnnnnnnnnnnnnnnnnnnnnnnnnnnnnnnnnnnnnnnnnnnnnnnnnnnnnnnnnnnnnnnnnnnnnnnnnnnnnnnnnnnnnnnnnnnnnnnnnnnnnnnnnnnnnnnnnnnnnnnnnnnnnnnnnnnnnnnnnnnnnnnnnnnnnnnnnnnnnnnnnnnnnnnnnnnnnnnnnnnnnnnnnnnnnnnnnnnnnnnnnnnnnnnnnnnnnnnnnnnnnnnnnnnnnnnnnnnnnnnnnnnnnnnnnnnnnnnnnnnnnnnnnnnnnnnnnnnnnnnnnnnnnnnnnnnnnnnnnnnnnnnnnnnnnnnnnnnnnnnnnnnnnnnnnnnnnnnnnnnnnnnnnnnnnnnnnnnnnnnnnnnnnnnnnnnnnnnnnnnnnnnnnnnnnnnnnnnnnnnnnnnnnnnnnnnnnnnnnnnnnnnnnnnnnnnnnnnnnnnnnnnnnnnnnnnnnnnnnnnnnnnnnnnnnnnnnnnnnnnnnnnnnnnnnnnnnnnnnnnnnnnnnnnnnnnnnnnnnnnnnnnnnnnnnnnnnnnnnnnnnnnnnnnnnnnnnnnnnnnnnnnnnnnnnnnnnnnnnnnnnnnnnnnnnnnnnnnnnnnnnnnnnnnnnnnnnnnnnnnnnnnnnnnnnnnnnnnnnnnnnnnnnnnnnnnnnnnnnnnnnnnnnnnnnnnnnnnnnnnnnnnnnnnnnnnnnnnnnnnnnnnnnnnnnnnnnnnnnnnnnnnnnnnnnnnnnnnnnnnnnnnnnnnnnnnnnnnnnnnnnnnnnnnnnnnnnnnnnnnnnnnnnnnnnnnnnnnnnnnnnnnnnnnnnnnnnnnnnnnnnnnnnnnnnnnnnnnnnnnnnnnnnnnnnnnnnnnnnnnnnnnnnnnnnnnnnnnnnnnnnnnnnnnnnnnnnnnnnnnnnnnnnnnnnnnnnnnnnnnnnnnnnnnnnnnnnnnnnnnnnnnnnnnnnnnnnnnnnnnnnnnnnnnnnnnnnnnnnnnnnnnnnnnnnnnnnnnnnnnnnnnnnnnnnnnnnnnnnnnnnnnnnnnnnnnnnnnnnnnnnnnnnnnnnnnnnnnnnnnnnnnnnnnnnnnnnnnnnnnnnnnnnnnnnnnnnnnnnnnnnnnnnnnnnnnnnnnnnnnnnnnnnnnnnnnnnnnnnnnnnnnnnnnnnnnnnnnnnnnnnnnnnnnnnnnnnnnnnnnnnnnnnnnnnnnnnnnnnnnnnnnnnnnnnnnnnnnnnnnnnnnnnnnnnnnnnnnnnnnnnnnnnnnnnnnnnnnnnnnnnnnnnnnnnnnnnnnnnnnnnnnnnnnnnnnnnnnnnnnnnnnnnnnnnnnnnnnnnnnnnnnnnnnnnnnnnnnnnnnnnnnnnnnnnnnnnnnnnnnnnnnnnnnnnnnnnnnnnnnnnnnnnnnnnnnnnnnnnnnnnnnnnnnnnnnnnnnnnnnnnnnnnnnnnnnnnnnnnnnnnnnnnnnnnnnnnnnnnnnnnnnnnnnnnnnnnnnnnnnnnnnnnnnnnnnnnnnnnnnnnnnnnnnnnnnnnnnnnnnnnnnnnnnnnnnnnnnnnnnnnnnnnnnnnnnnnnnnnnnnnnnnnnnnnnnnnnnnnnnnnnnnnnnnnnnnnnnnnnnnnnnnnnnnnnnnnnnnnnnnnnnnnnnnnnnnnnnnnnnnnnnnnnnnnnnnnnnnnnnnnnnnnnnnnnnnnnnnnnnnnnnnnnnnnnnnnnnnnnnnnnnnnnnnnnnnnnnnnnnnnnnnnnnnnnnnnnnnnnnnnnnnnnnnnnnnnnnnnnnnnnnnnnnnnnnnnnnnnnnnnnnnnnnnnnnnnnnnnnnnnnnnnnnnnnnnnnnnnnnnnnnnnnnnnnnnnnnnnnnnnnnnnnnnnnnnnnnnnnnnnnnnnnnnnnnnnnnnnnnnnnnnnnnnnnnnnnnnnnnnnnnnnnnnnnnnnnnnnnnnnnnnnnnnnnnnnnnnnnnnnnnnnnnnnnnnnnnnnnnnnnnnnnnnnnnnnnnnnnnnnnnnnnnnnnnnnnnnnnnnnnnnnnnnnnnnnnnnnnnnnnnnnnnnnnnnnnnnnnnnnnnnnnnnnnnnnnnnnnnnnnnnnnnnnnnnnnnnnnnnnnnnnnnnnnnnnnnnnnnnnnnnnnnnnnnnnnnnnnnnnnnnnnnnnnnnnnnnnnnnnnnnnnnnnnnnnnnnnnnnnnnnnnnnnnnnnnnnnnnnnnnnnnnnnnnnnnnnnnnnnnnnnnnnnnnnnnnnnnnnnnnnnnnnnnnnnnnnnnnnnnnnnnnnnnnnnnnnnnnnnnnnnnnnnnnnnnnnnnnnnnnnnnnnnnnnnnnnnnnnnnnnnnnnnnnnnnnnnnnnnnnnnnnnnnnnnnnnnnnnnnnnnnnnnnnnnnnnnnnnnnnnnnnnnnnnnnnnnnnnnnnnnnnnnnnnnnnnnnnnnnnnnnnnnnnnnnnnnnnnnnnnnnnnnnnnnnnnnnnnnnnnnnnnnnnnnnnnnnnnnnnnnnnnnnnnnnnnnnnnnnnnnnnnnnnnnnnnnnnnnnnnnnnnnnnnnnnnnnnnnnnnnnnnnnnnnnnnnnnnnnnnnnnnnnnnnnnnnnnnnnnnnnnnnnnnnnnnnnnnnnnnnnnnnnnnnnnnnnnnnnnnnnnnnnnnnnnnnnnnnnnnnnnnnnnnnnnnnnnnnnnnnnnnnnnnnnnnnnnnnnnnnnnnnnnnnnnnnnnnnnnnnnnnnnnnnnnnnnnnnnnnnnnnnnnnnnnnnnnnnnnnnnnnnnnnnnnnnnnnnnnnnnnnnnnnnnnnnnnnnnnnnnnnnnnnnnnnnnnnnnnnnnnnnnnnnnnnnnnnnnnnnnnnnnnnnnnnnnnnnnnnnnnnnnnnnnnnnnnnnnnnnnnnnnnnnnnnnnnnnnnnnnnnnnnnnnnnnnnnnnnnnnnnnnnnnnnnnnnnnnnnnnnnnnnnnnnnnnnnnnnnnnnnnnnnnnnnnnnnnnnnnnnnnnnnnnnnnnnnnnnnnnnnnnnnnnnnnnnnnnnnnnnnnnnnnnnnnnnnnnnnnnnnnnnnnnnnnnnnnnnnnnnnnnnnnnnnnnnnnnnnnnnnnnnnnnnnnnnnnnnnnnnnnnnnnnnnnnnnnnnnnnnnnnnnnnnnnnnnnnnnnnnnnnnnnnnnnnnnnnnnnnnnnnnnnnnnnnnnnnnnnnnnnnnnnnnnnnnnnnnnnnnnnnnnnnnnnnnnnnnnnnnnnnnnnnnnnnnnnnnnnnnnnnnnnnnnnnnnnnnnnnnnnnnnnnnnnnnnnnnnnnnnnnnnnnnnnnnnnnnnnnnnnnnnnnnnnnnnnnnnnnnnnnnnnnnnnnnnnnnnnnnnnnnnnnnnnnnnnnnnnnnnnnnnnnnnnnnnnnnnnnnnnnnnnnnnnnnnnnnnnnnnnnnnnnnnnnnnnnnnnnnnnnnnnnnnnnnnnnnnnnnnnnnnnnnnnnnnnnnnnnnnnnnnnnnnnnnnnnnnnnnnnnnnnnnnnnnnnnnnnnnnnnnnnnnnnnnnnnnnnnnnnnnnnnnnnnnnnnnnnnnnnnnnnnnnnnnnnnnnnnnnnnnnnnnnnnnnnnnnnnnnnnnnnnnnnnnnnnnnnnnnnnnnnnnnnnnnnnnnnnnnnnnnnnnnnnnnnnnnnnnnnnnnnnnnnnnnnnnnnnnnnnnnnnnnnnnnnnnnnnnnnnnnnnnnnnnnnnnnnnnnnnnnnnnnnnnnnnnnnnnnnnnnnnnnnnnnnnnnnnnnnnnnnnnnnnnnnnnnnnnnnnnnnnnnnnnnnnnnnnnnnnnnnnnnnnnnnnnnnnnnnnnnnnnnnnnnnnnnnnnnnnnnnnnnnnnnnnnnnnnnnnnnnnnnnnnnnnnnnnnnnnnnnnnnnnnnnnnnnnnnnnnnnnnnnnnnnnnnnnnnnnnnnnnnnnnnnnnnnnnnnnnnnnnnnnnnnnnnnnnnnnnnnnnnnnnnnnnnnnnnnnnnnnnnnnnnnnnnnnnnnnnnnnnnnnnnnnnnnnnnnnnnnnnnnnnnnnnnnnnnnnnnnnnnnnnnnnnnnnnnnnnnnnnnnnnnnnnnnnnnnnnnnnnnnnnnnnnnnnnnnnnnnnnnnnnnnnnnnnnnnnnnnnnnnnnnnnnnnnnnnnnnnnnnnnnnnnnnnnnnnnnnnnnnnnnnnnnnnnnnnnnnnnnnnnnnnnnnnnnnnnnnnnnnnnnnnnnnnnnnnnnnnnnnnnnnnnnnnnnnnnnnnnnnnnnnnnnnnnnnnnnnnnnnnnnnnnnnnnnnnnnnnnnnnnnnnnnnnnnnnnnnnnnnnnnnnnnnnnnnnnnnnnnnnnnnnnnnnnnnnnnnnnnnnnnnnnnnnnnnnnnnnnnnnnnnnnnnnnnnnnnnnnnnnnnnnnnnnnnnnnnnnnnnnnnnnnnnnnnnnnnnnnnnnnnnnnnnnnnnnnnnnnnnnnnnnnnnnnnnnnnnnnnnnnnnnnnnnnnnnnnnnnnnnnnnnnnnnnnnnnnnnnnnnnnnnnnnnnnnnnnnnnnnnnnnnnnnnnnnnnnnnnnnnnnnnnnnnnnnnnnnnnnnnnnnnnnnnnnnnnnnnnnnnnnnnnnnnnnnnnnnnnnnnnnnnnnnnnnnnnnnnnnnnnnnnnnnnnnnnnnnnnnnnnnnnnnnnnnnnnnnnnnnnnnnnnnnnnnnnnnnnnnnnnnnnnnnnnnnnnnnnnnnnnnnnnnnnnnnnnnnnnnnnnnnnnnnnnnnnnnnnnnnnnnnnnnnnnnnnnnnnnnnnnnnnnnnnnnnnnnnnnnnnnnnnnnnnnnnnnnnnnnnnnnnnnnnnnnnnnnnnnnnnnnnnnnnnnnnnnnnnnnnnnnnnnnnnnnnnnnnnnnnnnnnnnnnnnnnnnnnnnnnnnnnnnnnnnnnnnnnnnnnnnnnnnnnnnnnnnnnnnnnnnnnnnnnnnnnnnnnnnnnnnnnnnnnnnnnnnnnnnnnnnnnnnnnnnnnnnnnnnnnnnnnnnnnnnnnnnnnnnnnnnnnnnnnnnnnnnnnnnnnnnnnnnnnnnnnnnnnnnnnnnnnnnnnnnnnnnnnnnnnnnnnnnnnnnnnnnnnnnnnnnnnnnnnnnnnnnnnnnnnnnnnnnnnnnnnnnnnnnnnnnnnnnnnnnnnnnnnnnnnnnnnnnnnnnnnnnnnnnnnnnnnnnnnnnnnnnnnnnnnnnnnnnnnnnnnnnnnnnnnnnnnnnnnnnnnnnnnnnnnnnnnnnnnnnnnnnnnnnnnnnnnnnnnnnnnnnnnnnnnnnnnnnnnnnnnnnnnnnnnnnnnnnnnnnnnnnnnnnnnnnnnnnnnnnnnnnnnnnnnnnnnnnnnnnnnnnnnnnnnnnnnnnnnnnnnnnnnnnnnnnnnnnnnnnnnnnnnnnnnnnnnnnnnnnnnnnnnnnnnnnnnnnnnnnnnnnnnnnnnnnnnnnnnnnnnnnnnnnnnnnnnnnnnnnnnnnnnnnnnnnnnnnnnnnnnnnnnnnnnnnnnnnnnnnnnnnnnnnnnnnnnnnnnnnnnnnnnnnnnnnnnnnnnnnnnnnnnnnnnnnnnnnnnnnnnnnnnnnnnnnnnnnnnnnnnnnnnnnnnnnnnnnnnnnnnnnnnnnnnnnnnnnnnnnnnnnnnnnnnnnnnnnnnnnnnnnnnnnnnnnnnnnnnnnnnnnnnnnnnnnnnnnnnnnnnnnnnnnnnnnnnnnnnnnnnnnnnnnnnnnnnnnnnnnnnnnnnnnnnnnnnnnnnnnnnnnnnnnnnnnnnnnnnnnnnnnnnnnnnnnnnnnnnnnnnnnnnnnnnnnnnnnnnnnnnnnnnnnnnnnnnnnnnnnnnnnnnnnnnnnnnnnnnnnnnnnnnnnnnnnnnnnnnnnnnnnnnnnnnnnnnnnnnnnnnnnnnnnnnnnnnnnnnnnnnnnnnnnnnnnnnnnnnnnnnnnnnnnnnnnnnnnnnnnnnnnnnnnnnnnnnnnnnnnnnnnnnnnnnnnnnnnnnnnnnnnnnnnnnnnnnnnnnnnnnnnnnnnnnnnnnnnnnnnnnnnnnnnnnnnnnnnnnnnnnnnnnnnnnnnnnnnnnnnnnnnnnnnnnnnnnnnnnnnnnnnnnnnnnnnnnnnnnnnnnnnnnnnnnnnnnnnnnnnnnnnnnnnnnnnnnnnnnnnnnnnnnnnnnnnnnnnnnnnnnnnnnnnnnnnnnnnnnnnnnnnnnnnnnnnnnnnnnnnnnnnnnnnnnnnnnnnnnnnnnnnnnnnnnnnnnnnnnnnnnnnnnnnnnnnnnnnnnnnnnnnnnnnnnnnnnnnnnnnnnnnnnnnnnnnnnnnnnnnnnnnnnnnnnnnnnnnnnnnnnnnnnnnnnnnnnnnnnnnnnnnnnnnnnnnnnnnnnnnnnnnnnnnnnnnnnnnnnnnnnnnnnnnnnnnnnnnnnnnnnnnnnnnnnnnnnnnnnnnnnnnnnnnnnnnnnnnnnnnnnnnnnnnnnnnnnnnnnnnnnnnnnnnnnnnnnnnnnnnnnnnnnnnnnnnnnnnnnnnnnnnnnnnnnnnnnnnnnnnnnnnnnnnnnnnnnnnnnnnnnnnnnnnnnnnnnnnnnnnnnnnnnnnnnnnnnnnnnnnnnnnnnnnnnnnnnnnnnnnnnnnnnnnnnnnnnnnnnnnnnnnnnnnnnnnnnnnnnnnnnnnnnnnnnnnnnnnnnnnnnnnnnnnnnnnnnnnnnnnnnnnnnnnnnnnnnnnnnnnnnnnnnnnnnnnnnnnnnnnnnnnnnnnnnnnnnnnnnnnnnnnnnnnnnnnnnnnnnnnnnnnnnnnnnnnnnnnnnnnnnnnnnnnnnnnnnnnnnnnnnnnnnnnnnnnnnnnnnnnnnnnnnnnnnnnnnnnnnnnnnnnnnnnnnnnnnnnnnnnnnnnnnnnnnnnnnnnnnnnnnnnnnnnnnnnnnnnnnnnnnnnnnnnnnnnnnnnnnnnnnnnnnnnnnnnnnnnnnnnnnnnnnnnnnnnnnnnnnnnnnnnnnnnnnnnnnnnnnnnnnnnnnnnnnnnnnnnnnnnnnnnnnnnnnnnnnnnnnnnnnnnnnnnnnnnnnnnnnnnnnnnnnnnnnnnnnnnnnnnnnnnnnnnnnnnnnnnnnnnnnnnnnnnnnnnnnnnnnnnnnnnnnnnnnnnnnnnnnnnnnnnnnnnnnnnnnnnnnnnnnnnnnnnnnnnnnnnnnnnnnnnnnnnnnnnnnnnnnnnnnnnnnnnnnnnnnnnnnnnnnnnnnnnnnnnnnnnnnnnnnnnnnnnnnnnnnnnnnnnnnnnnnnnnnnnnnnnnnnnnnnnnnnnnnnnnnnnnnnnnnnnnnnnnnnnnnnnnnnnnnnnnnnnnnnnnnnnnnnnnnnnnnnnnnnnnnnnnnnnnnnnnnnnnnnnnnnnnnnnnnnnnnnnnnnnnnnnnnnnnnnnnnnnnnnnnnnnnnnnnnnnnnnnnnnnnnnnnnnnnnnnnnnnnnnnnnnnnnnnnnnnnnnnnnnnnnnnnnnnnnnnnnnnnnnnnnnnnnnnnnnnnnnnnnnnnnnnnnnnnnnnnnnnnnnnnnnnnnnnnnnnnnnnnnnnnnnnnnnnnnnnnnnnnnnnnnnnnnnnnnnnnnnnnnnnnnnnnnnnnnnnnnnnnnnnnnnnnnnnnnnnnnnnnnnnnnnnnnnnnnnnnnnnnnnnnnnnnnnnnnnnnnnnnnnnnnnnnnnnnnnnnnnnnnnnnnnnnnnnnnnnnnnnnnnnnnnnnnnnnnnnnnnnnnnnnnnnnnnnnnnnnnnnnnnnnnnnnnnnnnnnnnnnnnnnnnnnnnnnnnnnnnnnnnnnnnnnnnnnnnnnnnnnnnnnnnnnnnnnnnnnnnnnnnnnnnnnnnnnnnnnnnnnnnnnnnnnnnnnnnnnnnnnnnnnnnnnnnnnnnnnnnnnnnnnnnnnnnnnnnnnnnnnnnnnnnnnnnnnnnnnnnnnnnnnnnnnnnnnnnnnnnnnnnnnnnnnnnnnnnnnnnnnnnnnnnnnnnnnnnnnnnnnnnnnnnnnnnnnnnnnnnnnnnnnnnnnnnnnnnnnnnnnnnnnnnnnnnnnnnnnnnnnnnnnnnnnnnnnnnnnnnnnnnnnnnnnnnnnnnnnnnnnnnnnnnnnnnnnnnnnnnnnnnnnnnnnnnnnnnnnnnnnnnnnnnnnnnnnnnnnnnnnnnnnnnnnnnnnnnnnnnnnnnnnnnnnnnnnnnnnnnnnnnnnnnnnnnnnnnnnnnnnnnnnnnnnnnnnnnnnnnnnnnnnnnnnnnnnnnnnnnnnnnnnnnnnnnnnnnnnnnnnnnnnnnnnnnnnnnnnnnnnnnnnnnnnnnnnnnnnnnnnnnnnnnnnnnnnnnnnnnnnnnnnnnnnnnnnnnnnnnnnnnnnnnnnnnnnnnnnnnnnnnnnnnnnnnnnnnnnnnnnnnnnnnnnnnnnnnnnnnnnnnnnnnnnnnnnnnnnnnnnnnnnnnnnnnnnnnnnnnnnnnnnnnnnnnnnnnnnnnnnnnnnnnnnnnnnnnnnnnnnnnnnnnnnnnnnnnnnnnnnnnnnnnnnnnnnnnnnnnnnnnnnnnnnnnnnnnnnnnnnnnnnnnnnnnnnnnnnnnnnnnnnnnnnnnnnnnnnnnnnnnnnnnnnnnnnnnnnnnnnnnnnnnnnnnnnnnnnnnnnnnnnnnnnnnnnnnnnnnnnnnnnnnnnnnnnnnnnnnnnnnnnnnnnnnnnnnnnnnnnnnnnnnnnnnnnnnnnnnnnnnnnnnnnnnnnnnnnnnnnnnnnnnnnnnnnnnnnnnnnnnnnnnnnnnnnnnnnnnnnnnnnnnnnnnnnnnnnnnnnnnnnnnnnnnnnnnnnnnnnnnnnnnnnnnnnnnnnnnnnnnnnnnnnnnnnnnnnnnnnnnnnnnnnnnnnnnnnnnnnnnnnnnnnnnnnnnnnnnnnnnnnnnnnnnnnnnnnnnnnnnnnnnnnnnnnnnnnnnnnnnnnnnnnnnnnnnnnnnnnnnnnnnnnnnnnnnnnnnnnnnnnnnnnnnnnnnnnnnnnnnnnnnnnnnnnnnnnnnnnnnnnnnnnnnnnnnnnnnnnnnnnnnnnnnnnnnnnnnnnnnnnnnnnnnnnnnnnnnnnnnnnnnnnnnnnnnnnnnnnnnnnnnnnnnnnnnnnnnnnnnnnnnnnnnnnnnnnnnnnnnnnnnnnnnnnnnnnnnnnnnnnnnnnnnnnnnnnnnnnnnnnnnnnnnnnnnnnnnnnnnnnnnnnnnnnnnnnnnnnnnnnnnnnnnnnnnnnnnnnnnnnnnnnnnnnnnnnnnnnnnnnnnnnnnnnnnnnnnnnnnnnnnnnnnnnnnnnnnnnnnnnnnnnnnnnnnnnnnnnnnnnnnnnnnnnnnnnnnnnnnnnnnnnnnnnnnnnnnnnnnnnnnnnnnnnnnnnnnnnnnnnnnnnnnnnnnnnnnnnnnnnnnnnnnnnnnnnnnnnnnnnnnnnnnnnnnnnnnnnnnnnnnnnnnnnnnnnnnnnnnnnnnnnnnnnnnnnnnnnnnnnnnnnnnnnnnnnnnnnnnnnnnnnnnnnnnnnnnnnnnnnnnnnnnnnnnnnnnnnnnnnnnnnnnnnnnnnnnnnnnnnnnnnnnnnnnnnnnnnnnnnnnnnnnnnnnnnnnnnnnnnnnnnnnnnnnnnnnnnnnnnnnnnnnnnnnnnnnnnnnnnnnnnnnnnnnnnnnnnnnnnnnnnnnnnnnnnnnnnnnnnnnnnnnnnnnnnnnnnnnnnnnnnnnnnnnnnnnnnnnnnnnnnnnnnnnnnnnnnnnnnnnnnnnnnnnnnnnnnnnnnnnnnnnnnnnnnnnnnnnnnnnnnnnnnnnnnnnnnnnnnnnnnnnnnnnnnnnnnnnnnnnnnnnnnnnnnnnnnnnnnnnnnnnnnnnnnnnnnnnnnnnnnnnnnnnnnnnnnnnnnnnnnnnnnnnnnnnnnnnnnnnnnnnnnnnnnnnnnnnnnnnnnnnnnnnnnnnnnnnnnnnnnnnnnnnnnnnnnnnnnnnnnnnnnnnnnnnnnnnnnnnnnnnnnnnnnnnnnnnnnnnnnnnnnnnnnnnnnnnnnnnnnnnnnnnnnnnnnnnnnnnnnnnnnnnnnnnnnnnnnnnnnnnnnnnnnnnnnnnnnnnnnnnnnnnnnnnnnnnnnnnnnnnnnnnnnnnnnnnnnnnnnnnnnnnnnnnnnnnnnnnnnnnnnnnnnnnnnnnnnnnnnnnnnnnnnnnnnnnnnnnnnnnnnnnnnnnnnnnnnnnnnnnnnnnnnnnnnnnnnnnnnnnnnnnnnnnnnnnnnnnnnnnnnnnnnnnnnnnnnnnnnnnnnnnnnnnnnnnnnnnnnnnnnnnnnnnnnnnnnnnnnnnnnnnnnnnnnnnnnnnnnnnnnnnnnnnnnnnnnnnnnnnnnnnnnnnnnnnnnnnnnnnnnnnnnnnnnnnnnnnnnnnnnnnnnnnnnnnnnnnnnnnnnnnnnnnnnnnnnnnnnnnnnnnnnnnnnnnnnnnnnnnnnnnnnnnnnnnnnnnnnnnnnnnnnnnnnnnnnnnnnnnnnnnnnnnnnnnnnnnnnnnnnnnnnnnnnnnnnnnnnnnnnnnnnnnnnnnnnnnnnnnnnnnnnnnnnnnnnnnnnnnnnnnnnnnnnnnnnnnnnnnnnnnnnnnnnnnnnnnnnnnnnnnnnnnnnnnnnnnnnnnnnnnnnnnnnnnnnnnnnnnnnnnnnnnnnnnnnnnnnnnnnnnnnnnnnnnnnnnnnnnnnnnnnnnnnnnnnnnnnnnnnnnnnnnnnnnnnnnnnnnnnnnnnnnnnnnnnnnnnnnnnnnnnnnnnnnnnnnnnnnnnnnnnnnnnnnnnnnnnnnnnnnnnnnnnnnnnnnnnnnnnnnnnnnnnnnnnnnnnnnnnnnnnnnnnnnnnnnnnnnnnnnnnnnnnnnnnnnnnnnnnnnnnnnnnnnnnnnnnnnnnnnnnnnnnnnnnnnnnnnnnnnnnnnnnnnnnnnnnnnnnnnnnnnnnnnnnnnnnnnnnnnnnnnnnnnnnnnnnnnnnnnnnnnnnnnnnnnnnnnnnnnnnnnnnnnnnnnnnnnnnnnnnnnnnnnnnnnnnnnnnnnnnnnnnnnnnnnnnnnnnnnnnnnnnnnnnnnnnnnnnnnnnnnnnnnnnnnnnnnnnnnnnnnnnnnnnnnnnnnnnnnnnnnnnnnnnnnnnnnnnnnnnnnnnnnnnnnnnnnnnnnnnnnnnnnnnnnnnnnnnnnnnnnnnnnnnnnnnnnnnnnnnnnnnnnnnnnnnnnnnnnnnnnnnnnnnnnnnnnnnnnnnnnnnnnnnnnnnnnnnnnnnnnnnnnnnnnnnnnnnnnnnnnnnnnnnnnnnnnnnnnnnnnnnnnnnnnnnnnnnnnnnnnnnnnnnnnnnnnnnnnnnnnnnnnnnnnnnnnnnnnnnnnnnnnnnnnnnnnnnnnnnnnnnnnnnnnnnnnnnnnnnnnnnnnnnnnnnnnnnnnnnnnnnnnnnnnnnnnnnnnnnnnnnnnnnnnnnnnnnnnnnnnnnnnnnnnnnnnnnnnnnnnnnnnnnnnnnnnnnnnnnnnnnnnnnnnnnnnnnnnnnnnnnnnnnnnnnnnnnnnnnnnnnnnnnnnnnnnnnnnnnnnnnnnnnnnnnnnnnnnnnnnnnnnnnnnnnnnnnnnnnnnnnnnnnnnnnnnnnnnnnnnnnnnnnnnnnnnnnnnnnnnnnnnnnnnnnnnnnnnnnnnnnnnnnnnnnnnnnnnnnnnnnnnnnnnnnnnnnnnnnnnnnnnnnnnnnnnnnnnnnnnnnnnnnnnnnnnnnnnnnnnnnnnnnnnnnnnnnnnnnnnnnnnnnnnnnnnnnnnnnnnnnnnnnnnnnnnnnnnnnnnnnnnnnnnnnnnnnnnnnnnnnnnnnnnnnnnnnnnnnnnnnnnnnnnnnnnnnnnnnnnnnnnnnnnnnnnnnnnnnnnnnnnnnnnnnnnnnnnnnnnnnnnnnnnnnnnnnnnnnnnnnnnnnnnnnnnnnnnnnnnnnnnnnnnnnnnnnnnnnnnnnnnnnnnnnnnnnnnnnnnnnnnnnnnnnnnnnnnnnnnnnnnnnnnnnnnnnnnnnnnnnnnnnnnnnnnnnnnnnnnnnnnnnnnnnnnnnnnnnnnnnnnnnnnnnnnnnnnnnnnnnnnnnnnnnnnnnnnnnnnnnnnnnnnnnnnnnnnnnnnnnnnnnnnnnnnnnnnnnnnnnnnnnnnnnnnnnnnnnnnnnnnnnnnnnnnnnnnnnnnnnnnnnnnnnnnnnnnnnnnnnnnnnnnnnnnnnnnnnnnnnnnnnnnnnnnnnnnnnnnnnnnnnnnnnnnnnnnnnnnnnnnnnnnnnnnnnnnnnnnnnnnnnnnnnnnnnnnnnnnnnnnnnnnnnnnnnnnnnnnnnnnnnnnnnnnnnnnnnnnnnnnnnnnnnnnnnnnnnnnnnnnnnnnnnnnnnnnnnnnnnnnnnnnnnnnnnnnnnnnnnnnnnnnnnnnnnnnnnnnnnnnnnnnnnnnnnnnnnnnnnnnnnnnnnnnnnnnnnnnnnnnnnnnnnnnnnnnnnnnnnnnnnnnnnnnnnnnnnnnnnnnnnnnnnnnnnnnnnnnnnnnnnnnnnnnnnnnnnnnnnnnnnnnnnnnnnnnnnnnnnnnnnnnnnnnnnnnnnnnnnnnnnnnnnnnnnnnnnnnnnnnnnnnnnnnnnnnnnnnnnnnnnnnnnnnnnnnnnnnnnnnnnnnnnnnnnnnnnnnnnnnnnnnnnnnnnnnnnnnnnnnnnnnnnnnnnnnnnnnnnnnnnnnnnnnnnnnnnnnnnnnnnnnnnnnnnnnnnnnnnnnnnnnnnnnnnnnnnnnnnnnnnnnnnnnnnnnnnnnnnnnnnnnnnnnnnnnnnnnnnnnnnnnnnnnnnnnnnnnnnnnnnnnnnnnnnnnnnnnnnnnnnnnnnnnnnnnnnnnnnnnnnnnnnnnnnnnnnnnnnnnnnnnnnnnnnnnnnnnnnnnnnnnnnnnnnnnnnnnnnnnnnnnnnnnnnnnnnnnnnnnnnnnnnnnnnnnnnnnnnnnnnnnnnnnnnnnnnnnnnnnnnnnnnnnnnnnnnnnnnnnnnnnnnnnnnnnnnnnnnnnnnnnnnnnnnnnnnnnnnnnnnnnnnnnnnnnnnnnnnnnnnnnnnnnnnnnnnnnnnnnnnnnnnnnnnnnnnnnnnnnnnnnnnnnnnnnnnnnnnnnnnnnnnnnnnnnnnnnnnnnnnnnnnnnnnnnnnnnnnnnnnnnnnnnnnnnnnnnnnnnnnnnnnnnnnnnnnnnnnnnnnnnnnnnnnnnnnnnnnnnnnnnnnnnnnnnnnnnnnnnnnnnnnnnnnnnnnnnnnnnnnnnnnnnnnnnnnnnnnnnnnnnnnnnnnnnnnnnnnnnnnnnnnnnnnnnnnnnnnnnnnnnnnnnnnnnnnnnnnnnnnnnnnnnnnnnnnnnnnnnnnnnnnnnnnnnnnnnnnnnnnnnnnnnnnnnnnnnnnnnnnnnnnnnnnnnnnnnnnnnnnnnnnnnnnnnnnnnnnnnnnnnnnnnnnnnnnnnnnnnnnnnnnnnnnnnnnnnnnnnnnnnnnnnnnnnnnnnnnnnnnnnnnnnnnnnnnnnnnnnnnnnnnnnnnnnnnnnnnnnnnnnnnnnnnnnnnnnnnnnnnnnnnnnnnnnnnnnnnnnnnnnnnnnnnnnnnnnnnnnnnnnnnnnnnnnnnnnnnnnnnnnnnnnnnnnnnnnnnnnnnnnnnnnnnnnnnnnnnnnnnnnnnnnnnnnnnnnnnnnnnnnnnnnnnnnnnnnnnnnnnnnnnnnnnnnnnnnnnnnnnnnnnnnnnnnnnnnnnnnnnnnnnnnnnnnnnnnnnnnnnnnnnnnnnnnnnnnnnnnnnnnnnnnnnnnnnnnnnnnnnnnnnnnnnnnnnnnnnnnnnnnnnnnnnnnnnnnnnnnnnnnnnnnnnnnnnnnnnnnnnnnnnnnnnnnnnnnnnnnnnnnnnnnnnnnnnnnnnnnnnnnnnnnnnnnnnnnnnnnnnnnnnnnnnnnnnnnnnnnnnnnnnnnnnnnnnnnnnnnnnnnnnnnnnnnnnnnnnnnnnnnnnnnnnnnnnnnnnnnnnnnnnnnnnnnnnnnnnnnnnnnnnnnnnnnnnnnnnnnnnnnnnnnnnnnnnnnnnnnnnnnnnnnnnnnnnnnnnnnnnnnnnnnnnnnnnnnnnnnnnnnnnnnnnnnnnnnnnnnnnnnnnnnnnnnnnnnnnnnnnnnnnnnnnnnnnnnnnnnnnnnnnnnnnnnnnnnnnnnnnnnnnnnnnnnnnnnnnnnnnnnnnnnnnnnnnnnnnnnnnnnnnnnnnnnnnnnnnnnnnnnnnnnnnnnnnnnnnnnnnnnnnnnnnnnnnnnnnnnnnnnnnnnnnnnnnnnnnnnnnnnnnnnnnnnnnnnnnnnnnnnnnnnnnnnnnnnnnnnnnnnnnnnnnnnnnnnnnnnnnnnnnnnnnnnnnnnnnnnnnnnnnnnnnnnnnnnnnnnnnnnnnnnnnnnnnnnnnnnnnnnnnnnnnnnnnnnnnnnnnnnnnnnnnnnnnnnnnnnnnnnnnnnnnnnnnnnnnnnnnnnnnnnnnnnnnnnnnnnnnnnnnnnnnnnnnnnnnnnnnnnnnnnnnnnnnnnnnnnnnnnnnnnnnnnnnnnnnnnnnnnnnnnnnnnnnnnnnnnnnnnnnnnnnnnnnnnnnnnnnnnnnnnnnnnnnnnnnnnnnnnnnnnnnnnnnnnnnnnnnnnnnnnnnnnnnnnnnnnnnnnnnnnnnnnnnnnnnnnnnnnnnnnnnnnnnnnnnnnnnnnnnnnnnnnnnnnnnnnnnnnnnnnnnnnnnnnnnnnnnnnnnnnnnnnnnnnnnnnnnnnnnnnnnnnnnnnnnnnnnnnnnnnnnnnnnnnnnnnnnnnnnnnnnnnnnnnnnnnnnnnnnnnnnnnnnnnnnnnnnnnnnnnnnnnnnnnnnnnnnnnnnnnnnnnnnnnnnnnnnnnnnnnnnnnnnnnnnnnnnnnnnnnnnnnnnnnnnnnnnnnnnnnnnnnnnnnnnnnnnnnnnnnnnnnnnnnnnnnnnnnnnnnnnnnnnnnnnnnnnnnnnnnnnnnnnnnnnnnnnnnnnnnnnnnnnnnnnnnnnnnnnnnnnnnnnnnnnnnnnnnnnnnnnnnnnnnnnnnnnnnnnnnnnnnnnnnnnnnnnnnnnnnnnnnnnnnnnnnnnnnnnnnnnnnnnnnnnnnnnnnnnnnnnnnnnnnnnnnnnnnnnnnnnnnnnnnnnnnnnnnnnnnnnnnnnnnnnnnnnnnnnnnnnnnnnnnnnnnnnnnnnnnnnnnnnnnnnnnnnnnnnnnnnnnnnnnnnnnnnnnnnnnnnnnnnnnnnnnnnnnnnnnnnnnnnnnnnnnnnnnnnnnnnnnnnnnnnnnnnnnnnnnnnnnnnnnnnnnnnnnnnnnnnnnnnnnnnnnnnnnnnnnnnnnnnnnnnnnnnnnnnnnnnnnnnnnnnnnnnnnnnnnnnnnnnnnnnnnnnnnnnnnnnnnnnnnnnnnnnnnnnnnnnnnnnnnnnnnnnnnnnnnnnnnnnnnnnnnnnnnnnnnnnnnnnnnnnnnnnnnnnnnnnnnnnnnnnnnnnnnnnnnnnnnnnnnnnnnnnnnnnnnnnnnnnnnnnnnnnnnnnnnnnnnnnnnnnnnnnnnnnnnnnnnnnnnnnnnnnnnnnnnnnnnnnnnnnnnnnnnnnnnnnnnnnnnnnnnnnnnnnnnnnnnnnnnnnnnnnnnnnnnnnnnnnnnnnnnnnnnnnnnnnnnnnnnnnnnnnnnnnnnnnnnnnnnnnnnnnnnnnnnnnnnnnnnnnnnnnnnnnnnnnnnnnnnnnnnnnnnnnnnnnnnnnnnnnnnnnnnnnnnnnnnnnnnnnnnnnnnnnnnnnnnnnnnnnnnnnnnnnnnnnnnnnnnnnnnnnnnnnnnnnnnnnnnnnnnnnnnnnnnnnnnnnnnnnnnnnnnnnnnnnnnnnnnnnnnnnnnnnnnnnnnnnnnnnnnnnnnnnnnnnnnnnnnnnnnnnnnnnnnnnnnnnnnnnnnnnnnnnnnnnnnnnnnnnnnnnnnnnnnnnnnnnnnnnnnnnnnnnnnnnnnnnnnnnnnnnnnnnnnnnnnnnnnnnnnnnnnnnnnnnnnnnnnnnnnnnnnnnnnnnnnnnnnnnnnnnnnnnnnnnnnnnnnnnnnnnnnnnnnnnnnnnnnnnnnnnnnnnnnnnnnnnnnnnnnnnnnnnnnnnnnnnnnnnnnnnnnnnnnnnnnnnnnnnnnnnnnnnnnnnnnnnnnnnnnnnnnnnnnnnnnnnnnnnnnnnnnnnnnnnnnnnnnnnnnnnnnnnnnnnnnnnnnnnnnnnnnnnnnnnnnnnnnnnnnnnnnnnnnnnnnnnnnnnnnnnnnnnnnnnnnnnnnnnnnnnnnnnnnnnnnnnnnnnnnnnnnnnnnnnnnnnnnnnnnnnnnnnnnnnnnnnnnnnnnnnnnnnnnnnnnnnnnnnnnnnnnnnnnnnnnnnnnnnnnnnnnnnnnnnnnnnnnnnnnnnnnnnnnnnnnnnnnnnnnnnnnnnnnnnnnnnnnnnnnnnnnnnnnnnnnnnnnnnnnnnnnnnnnnnnnnnnnnnnnnnnnnnnnnnnnnnnnnnnnnnnnnnnnnnnnnnnnnnnnnnnnnnnnnnnnnnnnnnnnnnnnnnnnnnnnnnnnnnnnnnnnnnnnnnnnnnnnnnnnnnnnnnnnnnnnnnnnnnnnnnnnnnnnnnnnnnnnnnnnnnnnnnnnnnnnnnnnnnnnnnnnnnnnnnnnnnnnnnnnnnnnnnnnnnnnnnnnnnnnnnnnnnnnnnnnnnnnnnnnnnnnnnnnnnnnnnnnnnnnnnnnnnnnnnnnnnnnnnnnnnnnnnnnnnnnnnnnnnnnnnnnnnnnnnnnnnnnnnnnnnnnnnnnnnnnnnnnnnnnnnnnnnnnnnnnnnnnnnnnnnnnnnnnnnnnnnnnnnnnnnnnnnnnnnnnnnnnnnnnnnnnnnnnnnnnnnnnnnnnnnnnnnnnnnnnnnnnnnnnnnnnnnnnnnnnnnnnnnnnnnnnnnnnnnnnnnnnnnnnnnnnnnnnnnnnnnnnnnnnnnnnnnnnnnnnnnnnnnnnnnnnnnnnnnnnnnnnnnnnnnnnnnnnnnnnnnnnnnnnnnnnnnnnnnnnnnnnnnnnnnnnnnnnnnnnnnnnnnnnnnnnnnnnnnnnnnnnnnnnnnnnnnnnnnnnnnnnnnnnnnnnnnnnnnnnnnnnnnnnnnnnnnnnnnnnnnnnnnnnnnnnnnnnnnnnnnnnnnnnnnnnnnnnnnnnnnnnnnnnnnnnnnnnnnnnnnnnnnnnnnnnnnnnnnnnnnnnnnnnnnnnnnnnnnnnnnnnnnnnnnnnnnnnnnnnnnnnnnnnnnnnnnnnnnnnnnnnnnnnnnnnnnnnnnnnnnnnnnnnnnnnnnnnnnnnnnnnnnnnnnnnnnnnnnnnnnnnnnnnnnnnnnnnnnnnnnnnnnnnnnnnnnnnnnnnnnnnnnnnnnnnnnnnnnnnnnnnnnnnnnnnnnnnnnnnnnnnnnnnnnnnnnnnnnnnnnnnnnnnnnnnnnnnnnnnnnnnnnnnnnnnnnnnnnnnnnnnnnnnnnnnnnnnnnnnnnnnnnnnnnnnnnnnnnnnnnnnnnnnnnnnnnnnnnnnnnnnnnnnnnnnnnnnnnnnnnnnnnnnnnnnnnnnnnnnnnnnnnnnnnnnnnnnnnnnnnnnnnnnnnnnnnnnnnnnnnnnnnnnnnnnnnnnnnnnnnnnnnnnnnnnnnnnnnnnnnnnnnnnnnnnnnnnnnnnnnnnnnnnnnnnnnnnnnnnnnnnnnnnnnnnnnnnnnnnnnnnnnnnnnnnnnnnnnnnnnnnnnnnnnnnnnnnnnnnnnnnnnnnnnnnnnnnnnnnnnnnnnnnnnnnnnnnnnnnnnnnnnnnnnnnnnnnnnnnnnnnnnnnnnnnnnnnnnnnnnnnnnnnnnnnnnnnnnnnnnnnnnnnnnnnnnnnnnnnnnnnnnnnnnnnnnnnnnnnnnnnnnnnnnnnnnnnnnnnnnnnnnnnnnnnnnnnnnnnnnnnnnnnnnnnnnnnnnnnnnnnnnnnnnnnnnnnnnnnnnnnnnnnnnnnnnnnnnnnnnnnnnnnnnnnnnnnnnnnnnnnnnnnnnnnnnnnnnnnnnnnnnnnnnnnnnnnnnnnnnnnnnnnnnnnnnnnnnnnnnnnnnnnnnnnnnnnnnnnnnnnnnnnnnnnnnnnnnnnnnnnnnnnnnnnnnnnnnnnnnnnnnnnnnnnnnnnnnnnnnnnnnnnnnnnnnnnnnnnnnnnnnnnnnnnnnnnnnnnnnnnnnnnnnnnnnnnnnnnnnnnnnnnnnnnnnnnnnnnnnnnnnnnnnnnnnnnnnnnnnnnnnnnnnnnnnnnnnnnnnnnnnnnnnnnnnnnnnnnnnnnnnnnnnnnnnnnnnnnnnnnnnnnnnnnnnnnnnnnnnnnnnnnnnnnnnnnnnnnnnnnnnnnnnnnnnnnnnnnnnnnnnnnnnnnnnnnnnnnnnnnnnnnnnnnnnnnnnnnnnnnnnnnnnnnnnnnnnnnnnnnnnnnnnnnnnnnnnnnnnnnnnnnnnnnnnnnnnnnnnnnnnnnnnnnnnnnnnnnnnnnnnnnnnnnnnnnnnnnnnnnnnnnnnnnnnnnnnnnnnnnnnnnnnnnnnnnnnnnnnnnnnnnnnnnnnnnnnnnnnnnnnnnnnnnnnnnnnnnnnnnnnnnnnnnnnnnnnnnnnnnnnnnnnnnnnnnnnnnnnnnnnnnnnnnnnnnnnnnnnnnnnnnnnnnnnnnnnnnnnnnnnnnnnnnnnnnnnnnnnnnnnnnnnnnnnnnnnnnnnnnnnnnnnnnnnnnnnnnnnnnnnnnnnnnnnnnnnnnnnnnnnnnnnnnnnnnnnnnnnnnnnnnnnnnnnnnnnnnnnnnnnnnnnnnnnnnnnnnnnnnnnnnnnnnnnnnnnnnnnnnnnnnnnnnnnnnnnnnnnnnnnnnnnnnnnnnnnnnnnnnnnnnnnnnnnnnnnnnnnnnnnnnnnnnnnnnnnnnnnnnnnnnnnnnnnnnnnnnnnnnnnnnnnnnnnnnnnnnnnnnnnnnnnnnnnnnnnnnnnnnnnnnnnnnnnnnnnnnnnnnnnnnnnnnnnnnnnnnnnnnnnnnnnnnnnnnnnnnnnnnnnnnnnnnnnnnnnnnnnnnnnnnnnnnnnnnnnnnnnnnnnnnnnnnnnnnnnnnnnnnnnnnnnnnnnnnnnnnnnnnnnnnnnnnnnnnnnnnnnnnnnnnnnnnnnnnnnnnnnnnnnnnnnnnnnnnnnnnnnnnnnnnnnnnnnnnnnnnnnnnnnnnnnnnnnnnnnnnnnnnnnnnnnnnnnnnnnnnnnnnnnnnnnnnnnnnnnnnnnnnnnnnnnnnnnnnnnnnnnnnnnnnnnnnnnnnnnnnnnnnnnnnnnnnnnnnnnnnnnnnnnnnnnnnnnnnnnnnnnnnnnnnnnnnnnnnnnnnnnnnnnnnnnnnnnnnnnnnnnnnnnnnnnnnnnnnnnnnnnnnnnnnnnnnnnnnnnnnnnnnnnnnnnnnnnnnnnnnnnnnnnnnnnnnnnnnnnnnnnnnnnnnnnnnnnnnnnnnnnnnnnnnnnnnnnnnnnnnnnnnnnnnnnnnnnnnnnnnnnnnnnnnnnnnnnnnnnnnnnnnnnnnnnnnnnnnnnnnnnnnnnnnnnnnnnnnnnnnnnnnnnnnnnnnnnnnnnnnnnnnnnnnnnnnnnnnnnnnnnnnnnnnnnnnnnnnnnnnnnnnnnnnnnnnnnnnnnnnnnnnnnnnnnnnnnnnnnnnnnnnnnnnnnnnnnnnnnnnnnnnnnnnnnnnnnnnnnnnnnnnnnnnnnnnnnnnnnnnnnnnnnnnnnnnnnnnnnnnnnnnnnnnnnnnnnnnnnnnnnnnnnnnnnnnnnnnnnnnnnnnnnnnnnnnnnnnnnnnnnnnnnnnnnnnnnnnnnnnnnnnnnnnnnnnnnnnnnnnnnnnnnnnnnnnnnnnnnnnnnnnnnnnnnnnnnnnnnnnnnnnnnnnnnnnnnnnnnnnnnnnnnnnnnnnnnnnnnnnnnnnnnnnnnnnnnnnnnnnnnnnnnnnnnnnnnnnnnnnnnnnnnnnnnnnnnnnnnnnnnnnnnnnnnnnnnnnnnnnnnnnnnnnnnnnnnnnnnnnnnnnnnnnnnnnnnnnnnnnnnnnnnnnnnnnnnnnnnnnnnnnnnnnnnnnnnnnnnnnnnnnnnnnnnnnnnnnnnnnnnnnnnnnnnnnnnnnnnnnnnnnnnnnnnnnnnnnnnnnnnnnnnnnnnnnnnnnnnnnnnnnnnnnnnnnnnnnnnnnnnnnnnnnnnnnnnnnnnnnnnnnnnnnnnnnnnnnnnnnnnnnnnnnnnnnnnnnnnnnnnnnnnnnnnnnnnnnnnnnnnnnnnnnnnnnnnnnnnnnnnnnnnnnnnnnnnnnnnnnnnnnnnnnnnnnnnnnnnnnnnnnnnnnnnnnnnnnnnnnnnnnnnnnnnnnnnnnnnnnnnnnnnnnnnnnnnnnnnnnnnnnnnnnnnnnnnnnnnnnnnnnnnnnnnnnnnnnnnnnnnnnnnnnnnnnnnnnnnnnnnnnnnnnnnnnnnnnnnnnnnnnnnnnnnnnnnnnnnnnnnnnnnnnnnnnnnnnnnnnnnnnnnnnnnnnnnnnnnnnnnnnnnnnnnnnnnnnnnnnnnnnnnnnnnnnnnnnnnnnnnnnnnnnnnnnnnnnnnnnnnnnnnnnnnnnnnnnnnnnnnnnnnnnnnnnnnnnnnnnnnnnnnnnnnnnnnnnnnnnnnnnnnnnnnnnnnnnnnnnnnnnnnnnnnnnnnnnnnnnnnnnnnnnnnnnnnnnnnnnnnnnnnnnnnnnnnnnnnnnnnnnnnnnnnnnnnnnnnnnnnnnnnnnnnnnnnnnnnnnnnnnnnnnnnnnnnnnnnnnnnnnnnnnnnnnnnnnnnnnnnnnnnnnnnnnnnnnnnnnnnnnnnnnnnnnnnnnnnnnnnnnnnnnnnnnnnnnnnnnnnnnnnnnnnnnnnnnnnnnnnnnnnnnnnnnnnnnnnnnnnnnnnnnnnnnnnnnnnnnnnnnnnnnnnnnnnnnnnnnnnnnnnnnnnnnnnnnnnnnnnnnnnnnnnnnnnnnnnnnnnnnnnnnnnnnnnnnnnnnnnnnnnnnnnnnnnnnnnnnnnnnnnnnnnnnnnnnnnnnnnnnnnnnnnnnnnnnnnnnnnnnnnnnnnnnnnnnnnnnnnnnnnnnnnnnnnnnnnnnnnnnnnnnnnnnnnnnnnnnnnnnnnnnnnnnnnnnnnnnnnnnnnnnnnnnnnnnnnnnnnnnnnnnnnnnnnnnnnnnnnnnnnnnnnnnnnnnnnnnnnnnnnnnnnnnnnnnnnnnnnnnnnnnnnnnnnnnnnnnnnnnnnnnnnnnnnnnnnnnnnnnnnnnnnnnnnnnnnnnnnnnnnnnnnnnnnnnnnnnnnnnnnnnnnnnnnnnnnnnnnnnnnnnnnnnnnnnnnnnnnnnnnnnnnnnnnnnnnnnnnnnnnnnnnnnnnnnnnnnnnnnnnnnnnnnnnnnnnnnnnnnnnnnnnnnnnnnnnnnnnnnnnnnnnnnnnnnnnnnnnnnnnnnnnnnnnnnnnnnnnnnnnnnnnnnnnnnnnnnnnnnnnnnnnnnnnnnnnnnnnnnnnnnnnnnnnnnnnnnnnnnnnnnnnnnnnnnnnnnnnnnnnnnnnnnnnnnnnnnnnnnnnnnnnnnnnnnnnnnnnnnnnnnnnnnnnnnnnnnnnnnnnnnnnnnnnnnnnnnnnnnnnnnnnnnnnnnnnnnnnnnnnnnnnnnnnnnnnnnnnnnnnnnnnnnnnnnnnnnnnnnnnnnnnnnnnnnnnnnnnnnnnnnnnnnnnnnnnnnnnnnnnnnnnnnnnnnnnnnnnnnnnnnnnnnnnnnnnnnnnnnnnnnnnnnnnnnnnnnnnnnnnnnnnnnnnnnnnnnnnnnnnnnnnnnnnnnnnnnnnnnnnnnnnnnnnnnnnnnnnnnnnnnnnnnnnnnnnnnnnnnnnnnnnnnnnnnnnnnnnnnnnnnnnnnnnnnnnnnnnnnnnnnnnnnnnnnnnnnnnnnnnnnnnnnnnnnnnnnnnnnnnnnnnnnnnnnnnnnnnnnnnnnnnnnnnnnnnnnnnnnnnnnnnnnnnnnnnnnnnnnnnnnnnnnnnnnnnnnnnnnnnnnnnnnnnnnnnnnnnnnnnnnnnnnnnnnnnnnnnnnnnnnnnnnnnnnnnnnnnnnnnnnnnnnnnnnnnnnnnnnnnnnnnnnnnnnnnnnnnnnnnnnnnnnnnnnnnnnnnnnnnnnnnnnnnnnnnnnnnnnnnnnnnnnnnnnnnnnnnnnnnnnnnnnnnnnnnnnnnnnnnnnnnnnnnnnnnnnnnnnnnnnnnnnnnnnnnnnnnnnnnnnnnnnnnnnnnnnnnnnnnnnnnnnnnnnnnnnnnnnnnnnnnnnnnnnnnnnnnnnnnnnnnnnnnnnnnnnnnnnnnnnnnnnnnnnnnnnnnnnnnnnnnnnnnnnnnnnnnnnnnnnnnnnnnnnnnnnnnnnnnnnnnnnnnnnnnnnnnnnnnnnnnnnnnnnnnnnnnnnnnnnnnnnnnnnnnnnnnnnnnnnnnnnnnnnnnnnnnnnnnnnnnnnnnnnnnnnnnnnnnnnnnnnnnnnnnnnnnnnnnnnnnnnnnnnnnnnnnnnnnnnnnnnnnnnnnnnnnnnnnnnnnnnnnnnnnnnnnnnnnnnnnnnnnnnnnnnnnnnnnnnnnnnnnnnnnnnnnnnnnnnnnnnnnnnnnnnnnnnnnnnnnnnnnnnnnnnnnnnnnnnnnnnnnnnnnnnnnnnnnnnnnnnnnnnnnnnnnnnnnnnnnnnnnnnnnnnnnnnnnnnnnnnnnnnnnnnnnnnnnnnnnnnnnnnnnnnnnnnnnnnnnnnnnnnnnnnnnnnnnnnnnnnnnnnnnnnnnnnnnnnnnnnnnnnnnnnnnnnnnnnnnnnnnnnnnnnnnnnnnnnnnnnnnnnnnnnnnnnnnnnnnnnnnnnnnnnnnnnnnnnnnnnnnnnnnnnnnnnnnnnnnnnnnnnnnnnnnnnnnnnnnnnnnnnnnnnnnnnnnnnnnnnnnnnnnnnnnnnnnnnnnnnnnnnnnnnnnnnnnnnnnnnnnnnnnnnnnnnnnnnnnnnnnnnnnnnnnnnnnnnnnnnnnnnnnnnnnnnnnnnnnnnnnnnnnnnnnnnnnnnnnnnnnnnnnnnnnnnnnnnnnnnnnnnnnnnnnnnnnnnnnnnnnnnnnnnnnnnnnnnnnnnnnnnnnnnnnnnnnnnnnnnnnnnnnnnnnnnnnnnnnnnnnnnnnnnnnnnnnnnnnnnnnnnnnnnnnnnnnnnnnnnnnnnnnnnnnnnnnnnnnnnnnnnnnnnnnnnnnnnnnnnnnnnnnnnnnnnnnnnnnnnnnnnnnnnnnnnnnnnnnnnnnnnnnnnnnnnnnnnnnnnnnnnnnnnnnnnnnnnnnnnnnnnnnnnnnnnnnnnnnnnnnnnnnnnnnnnnnnnnnnnnnnnnnnnnnnnnnnnnnnnnnnnnnnnnnnnnnnnnnnnnnnnnnnnnnnnnnnnnnnnnnnnnnnnnnnnnnnnnnnnnnnnnnnnnnnnnnnnnnnnnnnnnnnnnnnnnnnnnnnnnnnnnnnnnnnnnnnnnnnnnnnnnnnnnnnnnnnnnnnnnnnnnnnnnnnnnnnnnnnnnnnnnnnnnnnnnnnnnnnnnnnnnnnnnnnnnnnnnnnnnnnnnnnnnnnnnnnnnnnnnnnnnnnnnnnnnnnnnnnnnnnnnnnnnnnnnnnnnnnnnnnnnnnnnnnnnnnnnnnnnnnnnnnnnnnnnnnnnnnnnnnnnnnnnnnnnnnnnnnnnnnnnnnnnnnnnnnnnnnnnnnnnnnnnnnnnnnnnnnnnnnnnnnnnnnnnnnnnnnnnnnnnnnnnnnnnnnnnnnnnnnnnnnnnnnnnnnnnnnnnnnnnnnnnnnnnnnnnnnnnnnnnnnnnnnnnnnnnnnnnnnnnnnnnnnnnnnnnnnnnnnnnnnnnnnnnnnnnnnnnnnnnnnnnnnnnnnnnnnnnnnnnnnnnnnnnnnnnnnnnnnnnnnnnnnnnnnnnnnnnnnnnnnnnnnnnnnnnnnnnnnnnnnnnnnnnnnnnnnnnnnnnnnnnnnnnnnnnnnnnnnnnnnnnnnnnnnnnnnnnnnnnnnnnnnnnnnnnnnnnnnnnnnnnnnnnnnnnnnnnnnnnnnnnnnnnnnnnnnnnnnnnnnnnnnnnnnnnnnnnnnnnnnnnnnnnnnnnnnnnnnnnnnnnnnnnnnnnnnnnnnnnnnnnnnnnnnnnnnnnnnnnnnnnnnnnnnnnnnnnnnnnnnnnnnnnnnnnnnnnnnnnnnnnnnnnnnnnnnnnnnnnnnnnnnnnnnnnnnnnnnnnnnnnnnnnnnnnnnnnnnnnnnnnnnnnnnnnnnnnnnnnnnnnnnnnnnnnnnnnnnnnnnnnnnnnnnnnnnnnnnnnnnnnnnnnnnnnnnnnnnnnnnnnnnnnnnnnnnnnnnnnnnnnnnnnnnnnnnnnnnnnnnnnnnnnnnnnnnnnnnnnnnnnnnnnnnnnnnnnnnnnnnnnnnnnnnnnnnnnnnnnnnnnnnnnnnnnnnnnnnnnnnnnnnnnnnnnnnnnnnnnnnnnnnnnnnnnnnnnnnnnnnnnnnnnnnnnnnnnnnnnnnnnnnnnnnnnnnnnnnnnnnnnnnnnnnnnnnnnnnnnnnnnnnnnnnnnnnnnnnnnnnnnnnnnnnnnnnnnnnnnnnnnnnnnnnnnnnnnnnnnnnnnnnnnnnnnnnnnnnnnnnnnnnnnnnnnnnnnnnnnnnnnnnnnnnnnnnnnnnnnnnnnnnnnnnnnnnnnnnnnnnnnnnnnnnnnnnnnnnnnnnnnnnnnnnnnnnnnnnnnnnnnnnnnnnnnnnnnnnnnnnnnnnnnnnnnnnnnnnnnnnnnnnnnnnnnnnnnnnnnnnnnnnnnnnnnnnnnnnnnnnnnnnnnnnnnnnnnnnnnnnnnnnnnnnnnnnnnnnnnnnnnnnnnnnnnnnnnnnnnnnnnnnnnnnnnnnnnnnnnnnnnnnnnnnnnnnnnnnnnnnnnnnnnnnnnnnnnnnnnnnnnnnnnnnnnnnnnnnnnnnnnnnnnnnnnnnnnnnnnnnnnnnnnnnnnnnnnnnnnnnnnnnnnnnnnnnnnnnnnnnnnnnnnnnnnnnnnnnnnnnnnnnnnnnnnnnnnnnnnnnnnnnnnnnnnnnnnnnnnnnnnnnnnnnnnnnnnnnnnnnnnnnnnnnnnnnnnnnnnnnnnnnnnnnnnnnnnnnnnnnnnnnnnnnnnnnnnnnnnnnnnnnnnnnnnnnnnnnnnnnnnnnnnnnnnnnnnnnnnnnnnnnnnnnnnnnnnnnnnnnnnnnnnnnnnnnnnnnnnnnnnnnnnnnnnnnnnnnnnnnnnnnnnnnnnnnnnnnnnnnnnnnnnnnnnnnnnnnnnnnnnnnnnnnnnnnnnnnnnnnnnnnnnnnnnnnnnnnnnnnnnnnnnnnnnnnnnnnnnnnnnnnnnnnnnnnnnnnnnnnnnnnnnnnnnnnnnnnnnnnnnnnnnnnnnnnnnnnnnnnnnnnnnnnnnnnnnnnnnnnnnnnnnnnnnnnnnnnnnnnnnnnnnnnnnnnnnnnnnnnnnnnnnnnnnnnnnnnnnnnnnnnnnnnnnnnnnnnnnnnnnnnnnnnnnnnnnnnnnnnnnnnnnnnnnnnnnnnnnnnnnnnnnnnnnnnnnnnnnnnnnnnnnnnnnnnnnnnnnnnnnnnnnnnnnnnnnnnnnnnnnnnnnnnnnnnnnnnnnnnnnnnnnnnnnnnnnnnnnnnnnnnnnnnnnnnnnnnnnnnnnnnnnnnnnnnnnnnnnnnnnnnnnnnnnnnnnnnnnnnnnnnnnnnnnnnnnnnnnnnnnnnnnnnnnnnnnnnnnnnnnnnnnnnnnnnnnnnnnnnnnnnnnnnnnnnnnnnnnnnnnnnnnnnnnnnnnnnnnnnnnnnnnnnnnnnnnnnnnnnnnnnnnnnnnnnnnnnnnnnnnnnnnnnnnnnnnnnnnnnnnnnnnnnnnnnnnnnnnnnnnnnnnnnnnnnnnnnnnnnnnnnnnnnnnnnnnnnnnnnnnnnnnnnnnnnnnnnnnnnnnnnnnnnnnnnnnnnnnnnnnnnnnnnnnnnnnnnnnnnnnnnnnnnnnnnnnnnnnnnnnnnnnnnnnnnnnnnnnnnnnnnnnnnnnnnnnnnnnnnnnnnnnnnnnnnnnnnnnnnnnnnnnnnnnnnnnnnnnnnnnnnnnnnnnnnnnnnnnnnnnnnnnnnnnnnnnnnnnnnnnnnnnnnnnnnnnnnnnnnnnnnnnnnnnnnnnnnnnnnnnnnnnnnnnnnnnnnnnnnnnnnnnnnnnnnnnnnnnnnnnnnnnnnnnnnnnnnnnnnnnnnnnnnnnnnnnnnnnnnnnnnnnnnnnnnnnnnnnnnnnnnnnnnnnnnnnnnnnnnnnnnnnnnnnnnnnnnnnnnnnnnnnnnnnnnnnnnnnnnnnnnnnnnnnnnnnnnnnnnnnnnnnnnnnnnnnnnnnnnnnnnnnnnnnnnnnnnnnnnnnnnnnnnnnnnnnnnnnnnnnnnnnnnnnnnnnnnnnnnnnnnnnnnnnnnnnnnnnnnnnnnnnnnnnnnnnnnnnnnnnnnnnnnnnnnnnnnnnnnnnnnnnnnnnnnnnnnnnnnnnnnnnnnnnnnnnnnnnnnnnnnnnnnnnnnnnnnnnnnnnnnnnnnnnnnnnnnnnnnnnnnnnnnnnnnnnnnnnnnnnnnnnnnnnnnnnnnnnnnnnnnnnnnnnnnnnnnnnnnnnnnnnnnnnnnnnnnnnnnnnnnnnnnnnnnnnnnnnnnnnnnnnnnnnnnnnnnnnnnnnnnnnnnnnnnnnnnnnnnnnnnnnnnnnnnnnnnnnnnnnnnnnnnnnnnnnnnnnnnnnnnnnnnnnnnnnnnnnnnnnnnnnnnnnnnnnnnnnnnnnnnnnnnnnnnnnnnnnnnnnnnnnnnnnnnnnnnnnnnnnnnnnnnnnnnnnnnnnnnnnnnnnnnnnnnnnnnnnnnnnnnnnnnnnnnnnnnnnnnnnnnnnnnnnnnnnnnnnnnnnnnnnnnnnnnnnnnnnnnnnnnnnnnnnnnnnnnnnnnnnnnnnnnnnnnnnnnnnnnnnnnnnnnnnnnnnnnnnnnnnnnnnnnnnnnnnnnnnnnnnnnnnnnnnnnnnnnnnnnnnnnnnnnnnnnnnnnnnnnnnnnnnnnnnnnnnnnnnnnnnnnnnnnnnnnnnnnnnnnnnnnnnnnnnnnnnnnnnnnnnnnnnnnnnnnnnnnnnnnnnnnnnnnnnnnnnnnnnnnnnnnnnnnnnnnnnnnnnnnnnnnnnnnnnnnnnnnnnnnnnnnnnnnnnnnnnnnnnnnnnnnnnnnnnnnnnnnnnnnnnnnnnnnnnnnnnnnnnnnnnnnnnnnnnnnnnnnnnnnnnnnnnnnnnnnnnnnnnnnnnnnnnnnnnnnnnnnnnnnnnnnnnnnnnnnnnnnnnnnnnnnnnnnnnnnnnnnnnnnnnnnnnnnnnnnnnnnnnnnnnnnnnnnnnnnnnnnnnnnnnnnnnnnnnnnnnnnnnnnnnnnnnnnnnnnnnnnnnnnnnnnnnnnnnnnnnnnnnnnnnnnnnnnnnnnnnnnnnnnnnnnnnnnnnnnnnnnnnnnnnnnnnnnnnnnnnnnnnnnnnnnnnnnnnnnnnnnnnnnnnnnnnnnnnnnnnnnnnnnnnnnnnnnnnnnnnnnnnnnnnnnnnnnnnnnnnnnnnnnnnnnnnnnnnnnnnnnnnnnnnnnnnnnnnnnnnnnnnnnnnnnnnnnnnnnnnnnnnnnnnnnnnnnnnnnnnnnnnnnnnnnnnnnnnnnnnnnnnnnnnnnnnnnnnnnnnnnnnnnnnnnnnnnnnnnnnnnnnnnnnnnnnnnnnnnnnnnnnnnnnnnnnnnnnnnnnnnnnnnnnnnnnnnnnnnnnnnnnnnnnnnnnnnnnnnnnnnnnnnnnnnnnnnnnnnnnnnnnnnnnnnnnnnnnnnnnnnnnnnnnnnnnnnnnnnnnnnnnnnnnnnnnnnnnnnnnnnnnnnnnnnnnnnnnnnnnnnnnnnnnnnnnnnnnnnnnnnnnnnnnnnnnnnnnnnnnnnnnnnnnnnnnnnnnnnnnnnnnnnnnnnnnnnnnnnnnnnnnnnnnnnnnnnnnnnnnnnnnnnnnnnnnnnnnnnnnnnnnnnnnnnnnnnnnnnnnnnnnnnnnnnnnnnnnnnnnnnnnnnnnnnnnnnnnnnnnnnnnnnnnnnnnnnnnnnnnnnnnnnnnnnnnnnnnnnnnnnnnnnnnnnnnnnnnnnnnnnnnnnnnnnnnnnnnnnnnnnnnnnnnnnnnnnnnnnnnnnnnnnnnnnnnnnnnnnnnnnnnnnnnnnnnnnnnnnnnnnnnnnnnnnnnnnnnnnnnnnnnnnnnnnnnnnnnnnnnnnnnnnnnnnnnnnnnnnnnnnnnnnnnnnnnnnnnnnnnnnnnnnnnnnnnnnnnnnnnnnnnnnnnnnnnnnnnnnnnnnnnnnnnnnnnnnnnnnnnnnnnnnnnnnnnnnnnnnnnnnnnnnnnnnnnnnnnnnnnnnnnnnnnnnnnnnnnnnnnnnnnnnnnnnnnnnnnnnnnnnnnnnnnnnnnnnnnnnnnnnnnnnnnnnnnnnnnnnnnnnnnnnnnnnnnnnnnnnnnnnnnnnnnnnnnnnnnnnnnnnnnnnnnnnnnnnnnnnnnnnnnnnnnnnnnnnnnnnnnnnnnnnnnnnnnnnnnnnnnnnnnnnnnnnnnnnnnnnnnnnnnnnnnnnnnnnnnnnnnnnnnnnnnnnnnnnnnnnnnnnnnnnnnnnnnnnnnnnnnnnnnnnnnnnnnnnnnnnnnnnnnnnnnnnnnnnnnnnnnnnnnnnnnnnnnnnnnnnnnnnnnnnnnnnnnnnnnnnnnnnnnnnnnnnnnnnnnnnnnnnnnnnnnnnnnnnnnnnnnnnnnnnnnnnnnnnnnnnnnnnnnnnnnnnnnnnnnnnnnnnnnnnnnnnnnnnnnnnnnnnnnnnnnnnnnnnnnnnnnnnnnnnnnnnnnnnnnnnnnnnnnnnnnnnnnnnnnnnnnnnnnnnnnnnnnnnnnnnnnnnnnnnnnnnnnnnnnnnnnnnnnnnnnnnnnnnnnnnnnnnnnnnnnnnnnnnnnnnnnnnnnnnnnnnnnnnnnnnnnnnnnnnnnnnnnnnnnnnnnnnnnnnnnnnnnnnnnnnnnnnnnnnnnnnnnnnnnnnnnnnnnnnnnnnnnnnnnnnnnnnnnnnnnnnnnnnnnnnnnnnnnnnnnnnnnnnnnnnnnnnnnnnnnnnnnnnnnnnnnnnnnnnnnnnnnnnnnnnnnnnnnnnnnnnnnnnnnnnnnnnnnnnnnnnnnnnnnnnnnnnnnnnnnnnnnnnnnnnnnnnnnnnnnnnnnnnnnnnnnnnnnnnnnnnnnnnnnnnnnnnnnnnnnnnnnnnnnnnnnnnnnnnnnnnnnnnnnnnnnnnnnnnnnnnnnnnnnnnnnnnnnnnnnnnnnnnnnnnnnnnnnnnnnnnnnnnnnnnnnnnnnnnnnnnnnnnnnnnnnnnnnnnnnnnnnnnnnnnnnnnnnnnnnnnnnnnnnnnnnnnnnnnnnnnnnnnnnnnnnnnnnnnnnnnnnnnnnnnnnnnnnnnnnnnnnnnnnnnnnnnnnnnnnnnnnnnnnnnnnnnnnnnnnnnnnnnnnnnnnnnnnnnnnnnnnnnnnnnnnnnnnnnnnnnnnnnnnnnnnnnnnnnnnnnnnnnnnnnnnnnnnnnnnnnnnnnnnnnnnnnnnnnnnnnnnnnnnnnnnnnnnnnnnnnnnnnnnnnnnnnnnnnnnnnnnnnnnnnnnnnnnnnnnnnnnnnnnnnnnnnnnnnnnnnnnnnnnnnnnnnnnnnnnnnnnnnnnnnnnnnnnnnnnnnnnnnnnnnnnnnnnnnnnnnnnnnnnnnnnnnnnnnnnnnnnnnnnnnnnnnnnnnnnnnnnnnnnnnnnnnnnnnnnnnnnnnnnnnnnnnnnnnnnnnnnnnnnnnnnnnnnnnnnnnnnnnnnnnnnnnnnnnnnnnnnnnnnnnnnnnnnnnnnnnnnnnnnnnnnnnnnnnnnnnnnnnnnnnnnnnnnnnnnnnnnnnnnnnnnnnnnnnnnnnnnnnnnnnnnnnnnnnnnnnnnnnnnnnnnnnnnnnnnnnnnnnnnnnnnnnnnnnnnnnnnnnnnnnnnnnnnnnnnnnnnnnnnnnnnnnnnnnnnnnnnnnnnnnnnnnnnnnnnnnnnnnnnnnnnnnnnnnnnnnnnnnnnnnnnnnnnnnnnnnnnnnnnnnnnnnnnnnnnnnnnnnnnnnnnnnnnnnnnnnnnnnnnnnnnnnnnnnnnnnnnnnnnnnnnnnnnnnnnnnnnnnnnnnnnnnnnnnnnnnnnnnnnnnnnnnnnnnnnnnnnnnnnnnnnnnnnnnnnnnnnnnnnnnnnnnnnnnnnnnnnnnnnnnnnnnnnnnnnnnnnnnnnnnnnnnnnnnnnnnnnnnnnnnnnnnnnnnnnnnnnnnnnnnnnnnnnnnnnnnnnnnnnnnnnnnnnnnnnnnnnnnnnnnnnnnnnnnnnnnnnnnnnnnnnnnnnnnnnnnnnnnnnnnnnnnnnnnnnnnnnnnnnnnnnnnnnnnnnnnnnnnnnnnnnnnnnnnnnnnnnnnnnnnnnnnnnnnnnnnnnnnnnnnnnnnnnnnnnnnnnnnnnnnnnnnnnnnnnnnnnnnnnnnnnnnnnnnnnnnnnnnnnnnnnnnnnnnnnnnnnnnnnnnnnnnnnnnnnnnnnnnnnnnnnnnnnnnnnnnnnnnnnnnnnnnnnnnnnnnnnnnnnnnnnnnnnnnnnnnnnnnnnnnnnnnnnnnnnnnnnnnnnnnnnnnnnnnnnnnnnnnnnnnnnnnnnnnnnnnnnnnnnnnnnnnnnnnnnnnnnnnnnnnnnnnnnnnnnnnnnnnnnnnnnnnnnnnnnnnnnnnnnnnnnnnnnnnnnnnnnnnnnnnnnnnnnnnnnnnnnnnnnnnnnnnnnnnnnnnnnnnnnnnnnnnnnnnnnnnnnnnnnnnnnnnnnnnnnnnnnnnnnnnnnnnnnnnnnnnnnnnnnnnnnnnnnnnnnnnnnnnnnnnnnnnnnnnnnnnnnnnnnnnnnnnnnnnnnnnnnnnnnnnnnnnnnnnnnnnnnnnnnnnnnnnnnnnnnnnnnnnnnnnnnnnnnnnnnnnnnnnnnnnnnnnnnnnnnnnnnnnnnnnnnnnnnnnnnnnnnnnnnnnnnnnnnnnnnnnnnnnnnnnnnnnnnnnnnnnnnnnnnnnnnnnnnnnnnnnnnnnnnnnnnnnnnnnnnnnnnnnnnnnnnnnnnnnnnnnnnnnnnnnnnnnnnnnnnnnnnnnnnnnnnnnnnnnnnnnnnnnnnnnnnnnnnnnnnnnnnnnnnnnnnnnnnnnnnnnnnnnnnnnnnnnnnnnnnnnnnnnnnnnnnnnnnnnnnnnnnnnnnnnnnnnnnnnnnnnnnnnnnnnnnnnnnnnnnnnnnnnnnnnnnnnnnnnnnnnnnnnnnnnnnnnnnnnnnnnnnnnnnnnnnnnnnnnnnnnnnnnnnnnnnnnnnnnnnnnnnnnnnnnnnnnnnnnnnnnnnnnnnnnnnnnnnnnnnnnnnnnnnnnnnnnnnnnnnnnnnnnnnnnnnnnnnnnnnnnnnnnnnnnnnnnnnnnnnnnnnnnnnnnnnnnnnnnnnnnnnnnnnnnnnnnnnnnnnnnnnnnnnnnnnnnnnnnnnnnnnnnnnnnnnnnnnnnnnnnnnnnnnnnnnnnnnnnnnnnnnnnnnnnnnnnnnnnnnnnnnnnnnnnnnnnnnnnnnnnnnnnnnnnnnnnnnnnnnnnnnnnnnnnnnnnnnnnnnnnnnnnnnnnnnnnnnnnnnnnnnnnnnnnnnnnnnnnnnnnnnnnnnnnnnnnnnnnnnnnnnnnnnnnnnnnnnnnnnnnnnnnnnnnnnnnnnnnnnnnnnnnnnnnnnnnnnnnnnnnnnnnnnnnnnnnnnnnnnnnnnnnnnnnnnnnnnnnnnnnnnnnnnnnnnnnnnnnnnnnnnnnnnnnnnnnnnnnnnnnnnnnnnnnnnnnnnnnnnnnnnnnnnnnnnnnnnnnnnnnnnnnnnnnnnnnnnnnnnnnnnnnnnnnnnnnnnnnnnnnnnnnnnnnnnnnnnnnnnnnnnnnnnnnnnnnnnnnnnnnnnnnnnnnnnnnnnnnnnnnnnnnnnnnnnnnnnnnnnnnnnnnnnnnnnnnnnnnnnnnnnnnnnnnnnnnnnnnnnnnnnnnnnnnnnnnnnnnnnnnnnnnnnnnnnnnnnnnnnnnnnnnnnnnnnnnnnnnnnnnnnnnnnnnnnnnnnnnnnnnnnnnnnnnnnnnnnnnnnnnnnnnnnnnnnnnnnnnnnnnnnnnnnnnnnnnnnnnnnnnnnnnnnnnnnnnnnnnnnnnnnnnnnnnnnnnnnnnnnnnnnnnnnnnnnnnnnnnnnnnnnnnnnnnnnnnnnnnnnnnnnnnnnnnnnnnnnnnnnnnnnnnnnnnnnnnnnnnnnnnnnnnnnnnnnnnnnnnnnnnnnnnnnnnnnnnnnnnnnnnnnnnnnnnnnnnnnnnnnnnnnnnnnnnnnnnnnnnnnnnnnnnnnnnnnnnnnnnnnnnnnnnnnnnnnnnnnnnnnnnnnnnnnnnnnnnnnnnnnnnnnnnnnnnnnnnnnnnnnnnnnnnnnnnnnnnnnnnnnnnnnnnnnnnnnnnnnnnnnnnnnnnnnnnnnnnnnnnnnnnnnnnnnnnnnnnnnnnnnnnnnnnnnnnnnnnnnnnnnnnnnnnnnnnnnnnnnnnnnnnnnnnnnnnnnnnnnnnnnnnnnnnnnnnnnnnnnnnnnnnnnnnnnnnnnnnnnnnnnnnnnnnnnnnnnnnnnnnnnnnnnnnnnnnnnnnnnnnnnnnnnnnnnnnnnnnnnnnnnnnnnnnnnnnnnnnnnnnnnnnnnnnnnnnnnnnnnnnnnnnnnnnnnnnnnnnnnnnnnnnnnnnnnnnnnnnnnnnnnnnnnnnnnnnnnnnnnnnnnnnnnnnnnnnnnnnnnnnnnnnnnnnnnnnnnnnnnnnnnnnnnnnnnnnnnnnnnnnnnnnnnnnnnnnnnnnnnnnnnnnnnnnnnnnnnnnnnnnnnnnnnnnnnnnnnnnnnnnnnnnnnnnnnnnnnnnnnnnnnnnnnnnnnnnnnnnnnnnnnnnnnnnnnnnnnnnnnnnnnnnnnnnnnnnnnnnnnnnnnnnnnnnnnnnnnnnnnnnnnnnnnnnnnnnnnnnnnnnnnnnnnnnnnnnnnnnnnnnnnnnnnnnnnnnnnnnnnnnnnnnnnnnnnnnnnnnnnnnnnnnnnnnnnnnnnnnnnnnnnnnnnnnnnnnnnnnnnnnnnnnnnnnnnnnnnnnnnnnnnnnnnnnnnnnnnnnnnnnnnnnnnnnnnnnnnnnnnnnnnnnnnnnnnnnnnnnnnnnnnnnnnnnnnnnnnnnnnnnnnnnnnnnnnnnnnnnnnnnnnnnnnnnnnnnnnnnnnnnnnnnnnnnnnnnnnnnnnnnnnnnnnnnnnnnnnnnnnnnnnnnnnnnnnnnnnnnnnnnnnnnnnnnnnnnnnnnnnnnnnnnnnnnnnnnnnnnnnnnnnnnnnnnnnnnnnnnnnnnnnnnnnnnnnnnnnnnnnnnnnnnnnnnnnnnnnnnnnnnnnnnnnnnnnnnnnnnnnnnnnnnnnnnnnnnnnnnnnnnnnnnnnnnnnnnnnnnnnnnnnnnnnnnnnnnnnnnnnnnnnnnnnnnnnnnnnnnnnnnnnnnnnnnnnnnnnnnnnnnnnnnnnnnnnnnnnnnnnnnnnnnnnnnnnnnnnnnnnnnnnnnnnnnnnnnnnnnnnnnnnnnnnnnnnnnnnnnnnnnnnnnnnnnnnnnnnnnnnnnnnnnnnnnnnnnnnnnnnnnnnnnnnnnnnnnnnnnnnnnnnnnnnnnnnnnnnnnnnnnnnnnnnnnnnnnnnnnnnnnnnnnnnnnnnnnnnnnnnnnnnnnnnnnnnnnnnnnnnnnnnnnnnnnnnnnnnnnnnnnnnnnnnnnnnnnnnnnnnnnnnnnnnnnnnnnnnnnnnnnnnnnnnnnnnnnnnnnnnnnnnnnnnnnnnnnnnnnnnnnnnnnnnnnnnnnnnnnnnnnnnnnnnnnnnnnnnnnnnnnnnnnnnnnnnnnnnnnnnnnnnnnnnnnnnnnnnnnnnnnnnnnnnnnnnnnnnnnnnnnnnnnnnnnnnnnnnnnnnnnnnnnnnnnnnnnnnnnnnnnnnnnnnnnnnnnnnnnnnnnnnnnnnnnnnnnnnnnnnnnnnnnnnnnnnnnnnnnnnnnnnnnnnnnnnnnnnnnnnnnnnnnnnnnnnnnnnnnnnnnnnnnnnnnnnnnnnnnnnnnnnnnnnnnnnnnnnnnnnnnnnnnnnnnnnnnnnnnnnnnnnnnnnnnnnnnnnnnnnnnnnnnnnnnnnnnnnnnnnnnnnnnnnnnnnnnnnnnnnnnnnnnnnnnnnnnnnnnnnnnnnnnnnnnnnnnnnnnnnnnnnnnnnnnnnnnnnnnnnnnnnnnnnnnnnnnnnnnnnnnnnnnnnnnnnnnnnnnnnnnnnnnnnnnnnnnnnnnnnnnnnnnnnnnnnnnnnnnnnnnnnnnnnnnnnnnnnnnnnnnnnnnnnnnnnnnnnnnnnnnnnnnnnnnnnnnnnnnnnnnnnnnnnnnnnnnnnnnnnnnnnnnnnnnnnnnnnnnnnnnnnnnnnnnnnnnnnnnnnnnnnnnnnnnnnnnnnnnnnnnnnnnnnnnnnnnnnnnnnnnnnnnnnnnnnnnnnnnnnnnnnnnnnnnnnnnnnnnnnnnnnnnnnnnnnnnnnnnnnnnnnnnnnnnnnnnnnnnnnnnnnnnnnnnnnnnnnnnnnnnnnnnnnnnnnnnnnnnnnnnnnnnnnnnnnnnnnnnnnnnnnnnnnnnnnnnnnnnnnnnnnnnnnnnnnnnnnnnnnnnnnnnnnnnnnnnnnnnnnnnnnnnnnnnnnnnnnnnnnnnnnnnnnnnnnnnnnnnnnnnnnnnnnnnnnnnnnnnnnnnnnnnnnnnnnnnnnnnnnnnnnnnnnnnnnnnnnnnnnnnnnnnnnnnnnnnnnnnnnnnnnnnnnnnnnnnnnnnnnnnnnnnnnnnnnnnnnnnnnnnnnnnnnnnnnnnnnnnnnnnnnnnnnnnnnnnnnnnnnnnnnnnnnnnnnnnnnnnnnnnnnnnnnnnnnnnnnnnnnnnnnnnnnnnnnnnnnnnnnnnnnnnnnnnnnnnnnnnnnnnnnnnnnnnnnnnnnnnnnnnnnnnnnnnnnnnnnnnnnnnnnnnnnnnnnnnnnnnnnnnnnnnnnnnnnnnnnnnnnnnnnnnnnnnnnnnnnnnnnnnnnnnnnnnnnnnnnnnnnnnnnnnnnnnnnnnnnnnnnnnnnnnnnnnnnnnnnnnnnnnnnnnnnnnnnnnnnnnnnnnnnnnnnnnnnnnnnnnnnnnnnnnnnnnnnnnnnnnnnnnnnnnnnnnnnnnnnnnnnnnnnnnnnnnnnnnnnnnnnnnnnnnnnnnnnnnnnnnnnnnnnnnnnnnnnnnnnnnnnnnnnnnnnnnnnnnnnnnnnnnnnnnnnnnnnnnnnnnnnnnnnnnnnnnnnnnnnnnnnnnnnnnnnnnnnnnnnnnnnnnnnnnnnnnnnnnnnnnnnnnnnnnnnnnnnnnnnnnnnnnnnnnnnnnnnnnnnnnnnnnnnnnnnnnnnnnnnnnnnnnnnnnnnnnnnnnnnnnnnnnnnnnnnnnnnnnnnnnnnnnnnnnnnnnnnnnnnnnnnnnnnnnnnnnnnnnnnnnnnnnnnnnnnnnnnnnnnnnnnnnnnnnnnnnnnnnnnnnnnnnnnnnnnnnnnnnnnnnnnnnnnnnnnnnnnnnnnnnnnnnnnnnnnnnnnnnnnnnnnnnnnnnnnnnnnnnnnnnnnnnnnnnnnnnnnnnnnnnnnnnnnnnnnnnnnnnnnnnnnnnnnnnnnnnnnnnnnnnnnnnnnnnnnnnnnnnnnnnnnnnnnnnnnnnnnnnnnnnnnnnnnnnnnnnnnnnnnnnnnnnnnnnnnnnnnnnnnnnnnnnnnnnnnnnnnnnnnnnnnnnnnnnnnnnnnnnnnnnnnnnnnnnnnnnnnnnnnnnnnnnnnnnnnnnnnnnnnnnnnnnnnnnnnnnnnnnnnnnnnnnnnnnnnnnnnnnnnnnnnnnnnnnnnnnnnnnnnnnnnnnnnnnnnnnnnnnnnnnnnnnnnnnnnnnnnnnnnnnnnnnnnnnnnnnnnnnnnnnnnnnnnnnnnnnnnnnnnnnnnnnnnnnnnnnnnnnnnnnnnnnnnnnnnnnnnnnnnnnnnnnnnnnnnnnnnnnnnnnnnnnnnnnnnnnnnnnnnnnnnnnnnnnnnnnnnnnnnnnnnnnnnnnnnnnnnnnnnnnnnnnnnnnnnnnnnnnnnnnnnnnnnnnnnnnnnnnnnnnnnnnnnnnnnnnnnnnnnnnnnnnnnnnnnnnnnnnnnnnnnnnnnnnnnnnnnnnnnnnnnnnnnnnnnnnnnnnnnnnnnnnnnnnnnnnnnnnnnnnnnnnnnnnnnnnnnnnnnnnnnnnnnnnnnnnnnnnnnnnnnnnnnnnnnnnnnnnnnnnnnnnnnnnnnnnnnnnnnnnnnnnnnnnnnnnnnnnnnnnnnnnnnnnnnnnnnnnnnnnnnnnnnnnnnnnnnnnnnnnnnnnnnnnnnnnnnnnnnnnnnnnnnnnnnnnnnnnnnnnnnnnnnnnnnnnnnnnnnnnnnnnnnnnnnnnnnnnnnnnnnnnnnnnnnnnnnnnnnnnnnnnnnnnnnnnnnnnnnnnnnnnnnnnnnnnnnnnnnnnnnnnnnnnnnnnnnnnnnnnnnnnnnnnnnnnnnnnnnnnnnnnnnnnnnnnnnnnnnnnnnnnnnnnnnnnnnnnnnnnnnnnnnnnnnnnnnnnnnnnnnnnnnnnnnnnnnnnnnnnnnnnnnnnnnnnnnnnnnnnnnnnnnnnnnnnnnnnnnnnnnnnnnnnnnnnnnnnnnnnnnnnnnnnnnnnnnnnnnnnnnnnnnnnnnnnnnnnnnnnnnnnnnnnnnnnnnnnnnnnnnnnnnnnnnnnnnnnnnnnnnnnnnnnnnnnnnnnnnnnnnnnnnnnnnnnnnnnnnnnnnnnnnnnnnnnnnnnnnnnnnnnnnnnnnnnnnnnnnnnnnnnnnnnnnnnnnnnnnnnnnnnnnnnnnnnnnnnnnnnnnnnnnnnnnnnnnnnnnnnnnnnnnnnnnnnnnnnnnnnnnnnnnnnnnnnnnnnnnnnnnnnnnnnnnnnnnnnnnnnnnnnnnnnnnnnnnnnnnnnnnnnnnnnnnnnnnnnnnnnnnnnnnnnnnnnnnnnnnnnnnnnnnnnnnnnnnnnnnnnnnnnnnnnnnnnnnnnnnnnnnnnnnnnnnnnnnnnnnnnnnnnnnnnnnnnnnnnnnnnnnnnnnnnnnnnnnnnnnnnnnnnnnnnnnnnnnnnnnnnnnnnnnnnnnnnnnnnnnnnnnnnnnnnnnnnnnnnnnnnnnnnnnnnnnnnnnnnnnnnnnnnnnnnnnnnnnnnnnnnnnnnnnnnnnnnnnnnnnnnnnnnnnnnnnnnnnnnnnnnnnnnnnnnnnnnnnnnnnnnnnnnnnnnnnnnnnnnnnnnnnnnnnnnnnnnnnnnnnnnnnnnnnnnnnnnnnnnnnnnnnnnnnnnnnnnnnnnnnnnnnnnnnnnnnnnnnnnnnnnnnnnnnnnnnnnnnnnnnnnnnnnnnnnnnnnnnnnnnnnnnnnnnnnnnnnnnnnnnnnnnnnnnnnnnnnnnnnnnnnnnnnnnnnnnnnnnnnnnnnnnnnnnnnnnnnnnnnnnnnnnnnnnnnnnnnnnnnnnnnnnnnnnnnnnnnnnnnnnnnnnnnnnnnnnnnnnnnnnnnnnnnnnnnnnnnnnnnnnnnnnnnnnnnnnnnnnnnnnnnnnnnnnnnnnnnnnnnnnnnnnnnnnnnnnnnnnnnnnnnnnnnnnnnnnnnnnnnnnnnnnnnnnnnnnnnnnnnnnnnnnnnnnnnnnnnnnnnnnnnnnnnnnnnnnnnnnnnnnnnnnnnnnnnnnnnnnnnnnnnnnnnnnnnnnnnnnnnnnnnnnnnnnnnnnnnnnnnnnnnnnnnnnnnnnnnnnnnnnnnnnnnnnnnnnnnnnnnnnnnnnnnnnnnnnnnnnnnnnnnnnnnnnnnnnnnnnnnnnnnnnnnnnnnnnnnnnnnnnnnnnnnnnnnnnnnnnnnnnnnnnnnnnnnnnnnnnnnnnnnnnnnnnnnnnnnnnnnnnnnnnnnnnnnnnnnnnnnnnnnnnnnnnnnnnnnnnnnnnnnnnnnnnnnnnnnnnnnnnnnnnnnnnnnnnnnnnnnnnnnnnnnnnnnnnnnnnnnnnnnnnnnnnnnnnnnnnnnnnnnnnnnnnnnnnnnnnnnnnnnnnnnnnnnnnnnnnnnnnnnnnnnnnnnnnnnnnnnnnnnnnnnnnnnnnnnnnnnnnnnnnnnnnnnnnnnnnnnnnnnnnnnnnnnnnnnnnnnnnnnnnnnnnnnnnnnnnnnnnnnnnnnnnnnnnnnnnnnnnnnnnnnnnnnnnnnnnnnnnnnnnnnnnnnnnnnnnnnnnnnnnnnnnnnnnnnnnnnnnnnnnnnnnnnnnnnnnnnnnnnnnnnnnnnnnnnnnnnnnnnnnnnnnnnnnnnnnnnnnnnnnnnnnnnnnnnnnnnnnnnnnnnnnnnnnnnnnnnnnnnnnnnnnnnnnnnnnnnnnnnnnnnnnnnnnnnnnnnnnnnnnnnnnnnnnnnnnnnnnnnnnnnnnnnnnnnnnnnnnnnnnnnnnnnnnnnnnnnnnnnnnnnnnnnnnnnnnnnnnnnnnnnnnnnnnnnnnnnnnnnnnnnnnnnnnnnnnnnnnnnnnnnnnnnnnnnnnnnnnnnnnnnnnnnnnnnnnnnnnnnnnnnnnnnnnnnnnnnnnnnnnnnnnnnnnnnnnnnnnnnnnnnnnnnnnnnnnnnnnnnnnnnnnnnnnnnnnnnnnnnnnnnnnnnnnnnnnnnnnnnnnnnnnnnnnnnnnnnnnnnnnnnnnnnnnnnnnnnnnnnnnnnnnnnnnnnnnnnnnnnnnnnnnnnnnnnnnnnnnnnnnnnnnnnnnnnnnnnnnnnnnnnnnnnnnnnnnnnnnnnnnnnnnnnnnnnnnnnnnnnnnnnnnnnnnnnnnnnnnnnnnnnnnnnnnnnnnnnnnnnnnnnnnnnnnnnnnnnnnnnnnnnnnnnnnnnnnnnnnnnnnnnnnnnnnnnnnnnnnnnnnnnnnnnnnnnnnnnnnnnnnnnnnnnnnnnnnnnnnnnnnnnnnnnnnnnnnnnnnnnnnnnnnnnnnnnnnnnnnnnnnnnnnnnnnnnnnnnnnnnnnnnnnnnnnnnnnnnnnnnnnnnnnnnnnnnnnnnnnnnnnnnnnnnnnnnnnnnnnnnnnnnnnnnnnnnnnnnnnnnnnnnnnnnnnnnnnnnnnnnnnnnnnnnnnnnnnnnnnnnnnnnnnnnnnnnnnnnnnnnnnnnnnnnnnnnnnnnnnnnnnnnnnnnnnnnnnnnnnnnnnnnnnnnnnnnnnnnnnnnnnnnnnnnnnnnnnnnnnnnnnnnnnnnnnnnnnnnnnnnnnnnnnnnnnnnnnnnnnnnnnnnnnnnnnnnnnnnnnnnnnnnnnnnnnnnnnnnnnnnnnnnnnnnnnnnnnnnnnnnnnnnnnnnnnnnnnnnnnnnnnnnnnnnnnnnnnnnnnnnnnnnnnnnnnnnnnnnnnnnnnnnnnnnnnnnnnnnnnnnnnnnnnnnnnnnnnnnnnnnnnnnnnnnnnnnnnnnnnnnnnnnnnnnnnnnnnnnnnnnnnnnnnnnnnnnnnnnnnnnnnnnnnnnnnnnnnnnnnnnnnnnnnnnnnnnnnnnnnnnnnnnnnnnnnnnnnnnnnnnnnnnnnnnnnnnnnnnnnnnnnnnnnnnnnnnnnnnnnnnnnnnnnnnnnnnnnnnnnnnnnnnnnnnnnnnnnnnnnnnnnnnnnnnnnnnnnnnnnnnnnnnnnnnnnnnnnnnnnnnnnnnnnnnnnnnnnnnnnnnnnnnnnnnnnnnnnnnnnnnnnnnnnnnnnnnnnnnnnnnnnnnnnnnnnnnnnnnnnnnnnnnnnnnnnnnnnnnnnnnnnnnnnnnnnnnnnnnnnnnnnnnnnnnnnnnnnnnnnnnnnnnnnnnnnnnnnnnnnnnnnnnnnnnnnnnnnnnnnnnnnnnnnnnnnnnnnnnnnnnnnnnnnnnnnnnnnnnnnnnnnnnnnnnnnnnnnnnnnnnnnnnnnnnnnnnnnnnnnnnnnnnnnnnnnnnnnnnnnnnnnnnnnnnnnnnnnnnnnnnnnnnnnnnnnnnnnnnnnnnnnnnnnnnnnnnnnnnnnnnnnnnnnnnnnnnnnnnnnnnnnnnnnnnnnnnnnnnnnnnnnnnnnnnnnnnnnnnnnnnnnnnnnnnnnnnnnnnnnnnnnnnnnnnnnnnnnnnnnnnnnnnnnnnnnnnnnnnnnnnnnnnnnnnnnnnnnnnnnnnnnnnnnnnnnnnnnnnnnnnnnnnnnnnnnnnnnnnnnnnnnnnnnnnnnnnnnnnnnnnnnnnnnnnnnnnnnnnnnnnnnnnnnnnnnnnnnnnnnnnnnnnnnnnnnnnnnnnnnnnnnnnnnnnnnnnnnnnnnnnnnnnnnnnnnnnnnnnnnnnnnnnnnnnnnnnnnnnnnnnnnnnnnnnnnnnnnnnnnnnnnnnnnnnnnnnnnnnnnnnnnnnnnnnnnnnnnnnnnnnnnnnnnnnnnnnnnnnnnnnnnnnnnnnnnnnnnnnnnnnnnnnnnnnnnnnnnnnnnnnnnnnnnnnnnnnnnnnnnnnnnnnnnnnnnnnnnnnnnnnnnnnnnnnnnnnnnnnnnnnnnnnnnnnnnnnnnnnnnnnnnnnnnnnnnnnnnnnnnnnnnnnnnnnnnnnnnnnnnnnnnnnnnnnnnnnnnnnnnnnnnnnnnnnnnnnnnnnnnnnnnnnnnnnnnnnnnnnnnnnnnnnnnnnnnnnnnnnnnnnnnnnnnnnnnnnnnnnnnnnnnnnnnnnnnnnnnnnnnnnnnnnnnnnnnnnnnnnnnnnnnnnnnnnnnnnnnnnnnnnnnnnnnnnnnnnnnnnnnnnnnnnnnnnnnnnnnnnnnnnnnnnnnnnnnnnnnnnnnnnnnnnnnnnnnnnnnnnnnnnnnnnnnnnnnnnnnnnnnnnnnnnnnnnnnnnnnnnnnnnnnnnnnnnnnnnnnnnnnnnnnnnnnnnnnnnnnnnnnnnnnnnnnnnnnnnnnnnnnnnnnnnnnnnnnnnnnnnnnnnnnnnnnnnnnnnnnnnnnnnnnnnnnnnnnnnnnnnnnnnnnnnnnnnnnnnnnnnnnnnnnnnnnnnnnnnnnnnnnnnnnnnnnnnnnnnnnnnnnnnnnnnnnnnnnnnnnnnnnnnnnnnnnnnnnnnnnnnnnnnnnnnnnnnnnnnnnnnnnnnnnnnnnnnnnnnnnnnnnnnnnnnnnnnnnnnnnnnnnnnnnnnnnnnnnnnnnnnnnnnnnnnnnnnnnnnnnnnnnnnnnnnnnnnnnnnnnnnnnnnnnnnnnnnnnnnnnnnnnnnnnnnnnnnnnnnnnnnnnnnnnnnnnnnnnnnnnnnnnnnnnnnnnnnnnnnnnnnnnnnnnnnnnnnnnnnnnnnnnnnnnnnnnnnnnnnnnnnnnnnnnnnnnnnnnnnnnnnnnnnnnnnnnnnnnnnnnnnnnnnnnnnnnnnnnnnnnnnnnnnnnnnnnnnnnnnnnnnnnnnnnnnnnnnnnnnnnnnnnnnnnnnnnnnnnnnnnnnnnnnnnnnnnnnnnnnnnnnnnnnnnnnnnnnnnnnnnnnnnnnnnnnnnnnnnnnnnnnnnnnnnnnnnnnnnnnnnnnnnnnnnnnnnnnnnnnnnnnnnnnnnnnnnnnnnnnnnnnnnnnnnnnnnnnnnnnnnnnnnnnnnnnnnnnnnnnnnnnnnnnnnnnnnnnnnnnnnnnnnnnnnnnnnnnnnnnnnnnnnnnnnnnnnnnnnnnnnnnnnnnnnnnnnnnnnnnnnnnnnnnnnnnnnnnnnnnnnnnnnnnnnnnnnnnnnnnnnnnnnnnnnnnnnnnnnnnnnnnnnnnnnnnnnnnnnnnnnnnnnnnnnnnnnnnnnnnnnnnnnnnnnnnnnnnnnnnnnnnnnnnnnnnnnnnnnnnnnnnnnnnnnnnnnnnnnnnnnnnnnnnnnnnnnnnnnnnnnnnnnnnnnnnnnnnnnnnnnnnnnnnnnnnnnnnnnnnnnnnnnnnnnnnnnnnnnnnnnnnnnnnnnnnnnnnnnnnnnnnnnnnnnnnnnnnnnnnnnnnnnnnnnnnnnnnnnnnnnnnnnnnnnnnnnnnnnnnnnnnnnnnnnnnnnnnnnnnnnnnnnnnnnnnnnnnnnnnnnnnnnnnnnnnnnnnnnnnnnnnnnnnnnnnnnnnnnnnnnnnnnnnnnnnnnnnnnnnnnnnnnnnnnnnnnnnnnnnnnnnnnnnnnnnnnnnnnnnnnnnnnnnnnnnnnnnnnnnnnnnnnnnnnnnnnnnnnnnnnnnnnnnnnnnnnnnnnnnnnnnnnnnnnnnnnnnnnnnnnnnnnnnnnnnnnnnnnnnnnnnnnnnnnnnnnnnnnnnnnnnnnnnnnnnnnnnnnnnnnnnnnnnnnnnnnnnnnnnnnnnnnnnnnnnnnnnnnnnnnnnnnnnnnnnnnnnnnnnnnnnnnnnnnnnnnnnnnnnnnnnnnnnnnnnnnnnnnnnnnnnnnnnnnnnnnnnnnnnnnnnnnnnnnnnnnnnnnnnnnnnnnnnnnnnnnnnnnnnnnnnnnnnnnnnnnnnnnnnnnnnnnnnnnnnnnnnnnnnnnnnnnnnnnnnnnnnnnnnnnnnnnnnnnnnnnnnnnnnnnnnnnnnnnnnnnnnnnnnnnnnnnnnnnnnnnnnnnnnnnnnnnnnnnnnnnnnnnnnnnnnnnnnnnnnnnnnnnnnnnnnnnnnnnnnnnnnnnnnnnnnnnnnnnnnnnnnnnnnnnnnnnnnnnnnnnnnnnnnnnnnnnnnnnnnnnnnnnnnnnnnnnnnnnnnnnnnnnnnnnnnnnnnnnnnnnnnnnnnnnnnnnnnnnnnnnnnnnnnnnnnnnnnnnnnnnnnnnnnnnnnnnnnnnnnnnnnnnnnnnnnnnnnnnnnnnnnnnnnnnnnnnnnnnnnnnnnnnnnnnnnnnnnnnnnnnnnnnnnnnnnnnnnnnnnnnnnnnnnnnnnnnnnnnnnnnnnnnnnnnnnnnnnnnnnnnnnnnnnnnnnnnnnnnnnnnnnnnnnnnnnnnnnnnnnnnnnnnnnnnnnnnnnnnnnnnnnnnnnnnnnnnnnnnnnnnnnnnnnnnnnnnnnnnnnnnnnnnnnnnnnnnnnnnnnnnnnnnnnnnnnnnnnnnnnnnnnnnnnnnnnnnnnnnnnnnnnnnnnnnnnnnnnnnnnnnnnnnnnnnnnnnnnnnnnnnnnnnnnnnnnnnnnnnnnnnnnnnnnnnnnnnnnnnnnnnnnnnnnnnnnnnnnnnnnnnnnnnnnnnnnnnnnnnnnnnnnnnnnnnnnnnnnnnnnnnnnnnnnnnnnnnnnnnnnnnnnnnnnnnnnnnnnnnnnnnnnnnnnnnnnnnnnnnnnnnnnnnnnnnnnnnnnnnnnnnnnnnnnnnnnnnnnnnnnnnnnnnnnnnnnnnnnnnnnnnnnnnnnnnnnnnnnnnnnnnnnnnnnnnnnnnnnnnnnnnnnnnnnnnnnnnnnnnnnnnnnnnnnnnnnnnnnnnnnnnnnnnnnnnnnnnnnnnnnnnnnnnnnnnnnnnnnnnnnnnnnnnnnnnnnnnnnnnnnnnnnnnnnnnnnnnnnnnnnnnnnnnnnnnnnnnnnnnnnnnnnnnnnnnnnnnnnnnnnnnnnnnnnnnnnnnnnnnnnnnnnnnnnnnnnnnnnnnnnnnnnnnnnnnnnnnnnnnnnnnnnnnnnnnnnnnnnnnnnnnnnnnnnnnnnnnnnnnnnnnnnnnnnnnnnnnnnnnnnnnnnnnnnnnnnnnnnnnnnnnnnnnnnnnnnnnnnnnnnnnnnnnnnnnnnnnnnnnnnnnnnnnnnnnnnnnnnnnnnnnnnnnnnnnnnnnnnnnnnnnnnnnnnnnnnnnnnnnnnnnnnnnnnnnnnnnnnnnnnnnnnnnnnnnnnnnnnnnnnnnnnnnnnnnnnnnnnnnnnnnnnnnnnnnnnnnnnnnnnnnnnnnnnnnnnnnnnnnnnnnnnnnnnnnnnnnnnnnnnnnnnnnnnnnnnnnnnnnnnnnnnnnnnnnnnnnnnnnnnnnnnnnnnnnnnnnnnnnnnnnnnnnnnnnnnnnnnnnnnnnnnnnnnnnnnnnnnnnnnnnnnnnnnnnnnnnnnnnnnnnnnnnnnnnnnnnnnnnnnnnnnnnnnnnnnnnnnnnnnnnnnnnnnnnnnnnnnnnnnnnnnnnnnnnnnnnnnnnnnnnnnnnnnnnnnnnnnnnnnnnnnnnnnnnnnnnnnnnnnnnnnnnnnnnnnnnnnnnnnnnnnnnnnnnnnnnnnnnnnnnnnnnnnnnnnnnnnnnnnnnnnnnnnnnnnnnnnnnnnnnnnnnnnnnnnnnnnnnnnnnnnnnnnnnnnnnnnnnnnnnnnnnnnnnnnnnnnnnnnnnnnnnnnnnnnnnnnnnnnnnnnnnnnnnnnnnnnnnnnnnnnnnnnnnnnnnnnnnnnnnnnnnnnnnnnnnnnnnnnnnnnnnnnnnnnnnnnnnnnnnnnnnnnnnnnnnnnnnnnnnnnnnnnnnnnnnnnnnnnnnnnnnnnnnnnnnnnnnnnnnnnnnnnnnnnnnnnnnnnnnnnnnnnnnnnnnnnnnnnnnnnnnnnnnnnnnnnnnnnnnnnnnnnnnnnnnnnnnnnnnnnnnnnnnnnnnnnnnnnnnnnnnnnnnnnnnnnnnnnnnnnnnnnnnnnnnnnnnnnnnnnnnnnnnnnnnnnnnnnnnnnnnnnnnnnnnnnnnnnnnnnnnnnnnnnnnnnnnnnnnnnnnnnnnnnnnnnnnnnnnnnnnnnnnnnnnnnnnnnnnnnnnnnnnnnnnnnnnnnnnnnnnnnnnnnnnnnnnnnnnnnnnnnnnnnnnnnnnnnnnnnnnnnnnnnnnnnnnnnnnnnnnnnnnnnnnnnnnnnnnnnnnnnnnnnnnnnnnnnnnnnnnnnnnnnnnnnnnnnnnnnnnnnnnnnnnnnnnnnnnnnnnnnnnnnnnnnnnnnnnnnnnnnnnnnnnnnnnnnnnnnnnnnnnnnnnnnnnnnnnnnnnnnnnnnnnnnnnnnnnnnnnnnnnnnnnnnnnnnnnnnnnnnnnnnnnnnnnnnnnnnnnnnnnnnnnnnnnnnnnnnnnnnnnnnnnnnnnnnnnnnnnnnnnnnnnnnnnnnnnnnnnnnnnnnnnnnnnnnnnnnnnnnnnnnnnnnnnnnnnnnnnnnnnnnnnnnnnnnnnnnnnnnnnnnnnnnnnnnnnnnnnnnnnnnnnnnnnnnnnnnnnnnnnnnnnnnnnnnnnnnnnnnnnnnnnnnnnnnnnnnnnnnnnnnnnnnnnnnnnnnnnnnnnnnnnnnnnnnnnnnnnnnnnnnnnnnnnnnnnnnnnnnnnnnnnnnnnnnnnnnnnnnnnnnnnnnnnnnnnnnnnnnnnnnnnnnnnnnnnnnnnnnnnnnnnnnnnnnnnnnnnnnnnnnnnnnnnnnnnnnnnnnnnnnnnnnnnnnnnnnnnnnnnnnnnnnnnnnnnnnnnnnnnnnnnnnnnnnnnnnnnnnnnnnnnnnnnnnnnnnnnnnnnnnnnnnnnnnnnnnnnnnnnnnnnnnnnnnnnnnnnnnnnnnnnnnnnnnnnnnnnnnnnnnnnnnnnnnnnnnnnnnnnnnnnnnnnnnnnnnnnnnnnnnnnnnnnnnnnnnnnnnnnnnnnnnnnnnnnnnnnnnnnnnnnnnnnnnnnnnnnnnnnnnnnnnnnnnnnnnnnnnnnnnnnnnnnnnnnnnnnnnnnnnnnnnnnnnnnnnnnnnnnnnnnnnnnnnnnnnnnnnnnnnnnnnnnnnnnnnnnnnnnnnnnnnnnnnnnnnnnnnnnnnnnnnnnnnnnnnnnnnnnnnnnnnnnnnnnnnnnnnnnnnnnnnnnnnnnnnnnnnnnnnnnnnnnnnnnnnnnnnnnnnnnnnnnnnnnnnnnnnnnnnnnnnnnnnnnnnnnnnnnnnnnnnnnnnnnnnnnnnnnnnnnnnnnnnnnnnnnnnnnnnnnnnnnnnnnnnnnnnnnnnnnnnnnnnnnnnnnnnnnnnnnnnnnnnnnnnnnnnnnnnnnnnnnnnnnnnnnnnnnnnnnnnnnnnnnnnnnnnnnnnnnnnnnnnnnnnnnnnnnnnnnnnnnnnnnnnnnnnnnnnnnnnnnnnnnnnnnnnnnnnnnnnnnnnnnnnnnnnnnnnnnnnnnnnnnnnnnnnnnnnnnnnnnnnnnnnnnnnnnnnnnnnnnnnnnnnnnnnnnnnnnnnnnnnnnnnnnnnnnnnnnnnnnnnnnnnnnnnnnnnnnnnnnnnnnnnnnnnnnnnnnnnnnnnnnnnnnnnnnnnnnnnnnnnnnnnnnnnnnnnnnnnnnnnnnnnnnnnnnnnnnnnnnnnnnnnnnnnnnnnnnnnnnnnnnnnnnnnnnnnnnnnnnnnnnnnnnnnnnnnnnnnnnnnnnnnnnnnnnnnnnnnnnnnnnnnnnnnnnnnnnnnnnnnnnnnnnnnnnnnnnnnnnnnnnnnnnnnnnnnnnnnnnnnnnnnnnnnnnnnnnnnnnnnnnnnnnnnnnnnnnnnnnnnnnnnnnnnnnnnnnnnnnnnnnnnnnnnnnnnnnnnnnnnnnnnnnnnnnnnnnnnnnnnnnnnnnnnnnnnnnnnnnnnnnnnnnnnnnnnnnnnnnnnnnnnnnnnnnnnnnnnnnnnnnnnnnnnnnnnnnnnnnnnnnnnnnnnnnnnnnnnnnnnnnnnnnnnnnnnnnnnnnnnnnnnnnnnnnnnnnnnnnnnnnnnnnnnnnnnnnnnnnnnnnnnnnnnnnnnnnnnnnnnnnnnnnnnnnnnnnnnnnnnnnnnnnnnnnnnnnnnnnnnnnnnnnnnnnnnnnnnnnnnnnnnnnnnnnnnnnnnnnnnnnnnnnnnnnnnnnnnnnnnnnnnnnnnnnnnnnnnnnnnnnnnnnnnnnnnnnnnnnnnnnnnnnnnnnnnnnnnnnnnnnnnnnnnnnnnnnnnnnnnnnnnnnnnnnnnnnnnnnnnnnnnnnnnnnnnnnnnnnnnnnnnnnnnnnnnnnnnnnnnnnnnnnnnnnnnnnnnnnnnnnnnnnnnnnnnnnnnnnnnnnnnnnnnnnnnnnnnnnnnnnnnnnnnnnnnnnnnnnnnnnnnnnnnnnnnnnnnnnnnnnnnnnnnnnnnnnnnnnnnnnnnnnnnnnnnnnnnnnnnnnnnnnnnnnnnnnnnnnnnnnnnnnnnnnnnnnnnnnnnnnnnnnnnnnnnnnnnnnnnnnnnnnnnnnnnnnnnnnnnnnnnnnnnnnnnnnnnnnnnnnnnnnnnnnnnnnnnnnnnnnnnnnnnnnnnnnnnnnnnnnnnnnnnnnnnnnnnnnnnnnnnnnnnnnnnnnnnnnnnnnnnnnnnnnnnnnnnnnnnnnnnnnnnnnnnnnnnnnnnnnnnnnnnnnnnnnnnnnnnnnnnnnnnnnnnnnnnnnnnnnnnnnnnnnnnnnnnnnnnnnnnnnnnnnnnnnnnnnnnnnnnnnnnnnnnnnnnnnnnnnnnnnnnnnnnnnnnnnnnnnnnnnnnnnnnnnnnnnnnnnnnnnnnnnnnnnnnnnnnnnnnnnnnnnnnnnnnnnnnnnnnnnnnnnnnnnnnnnnnnnnnnnnnnnnnnnnnnnnnnnnnnnnnnnnnnnnnnnnnnnnnnnnnnnnnnnnnnnnnnnnnnnnnnnnnnnnnnnnnnnnnnnnnnnnnnnnnnnnnnnnnnnnnnnnnnnnnnnnnnnnnnnnnnnnnnnnnnnnnnnnnnnnnnnnnnnnnnnnnnnnnnnnnnnnnnnnnnnnnnnnnnnnnnnnnnnnnnnnnnnnnnnnnnnnnnnnnnnnnnnnnnnnnnnnnnnnnnnnnnnnnnnnnnnnnnnnnnnnnnnnnnnnnnnnnnnnnnnnnnnnnnnnnnnnnnnnnnnnnnnnnnnnnnnnnnnnnnnnnnnnnnnnnnnnnnnnnnnnnnnnnnnnnnnnnnnnnnnnnnnnnnnnnnnnnnnnnnnnnnnnnnnnnnnnnnnnnnnnnnnnnnnnnnnnnnnnnnnnnnnnnnnnnnnnnnnnnnnnnnnnnnnnnnnnnnnnnnnnnnnnnnnnnnnnnnnnnnnnnnnnnnnnnnnnnnnnnnnnnnnnnnnnnnnnnnnnnnnnnnnnnnnnnnnnnnnnnnnnnnnnnnnnnnnnnnnnnnnnnnnnnnnnnnnnnnnnnnnnnnnnnnnnnnnnnnnnnnnnnnnnnnnnnnnnnnnnnnnnnnnnnnnnnnnnnnnnnnnnnnnnnnnnnnnnnnnnnnnnnnnnnnnnnnnnnnnnnnnnnnnnnnnnnnnnnnnnnnnnnnnnnnnnnnnnnnnnnnnnnnnnnnnnnnnnnnnnnnnnnnnnnnnnnnnnnnnnnnnnnnnnnnnnnnnnnnnnnnnnnnnnnnnnnnnnnnnnnnnnnnnnnnnnnnnnnnnnnnnnnnnnnnnnnnnnnnnnnnnnnnnnnnnnnnnnnnnnnnnnnnnnnnnnnnnnnnnnnnnnnnnnnnnnnnnnnnnnnnnnnnnnnnnnnnnnnnnnnnnnnnnnnnnnnnnnnnnnnnnnnnnnnnnnnnnnnnnnnnnnnnnnnnnnnnnnnnnnnnnnnnnnnnnnnnnnnnnnnnnnnnnnnnnnnnnnnnnnnnnnnnnnnnnnnnnnnnnnnnnnnnnnnnnnnnnnnnnnnnnnnnnnnnnnnnnnnnnnnnnnnnnnnnnnnnnnnnnnnnnnnnnnnnnnnnnnnnnnnnnnnnnnnnnnnnnnnnnnnnnnnnnnnnnnnnnnnnnnnnnnnnnnnnnnnnnnnnnnnnnnnnnnnnnnnnnnnnnnnnnnnnnnnnnnnnnnnnnnnnnnnnnnnnnnnnnnnnnnnnnnnnnnnnnnnnnnnnnnnnnnnnnnnnnnnnnnnnnnnnnnnnnnnnnnnnnnnnnnnnnnnnnnnnnnnnnnnnnnnnnnnnnnnnnnnnnnnnnnnnnnnnnnnnnnnnnnnnnnnnnnnnnnnnnnnnnnnnnnnnnnnnnnnnnnnnnnnnnnnnnnnnnnnnnnnnnnnnnnnnnnnnnnnnnnnnnnnnnnnnnnnnnnnnnnnnnnnnnnnnnnnnnnnnnnnnnnnnnnnnnnnnnnnnnnnnnnnnnnnnnnnnnnnnnnnnnnnnnnnnnnnnnnnnnnnnnnnnnnnnnnnnnnnnnnnnnnnnnnnnnnnnnnnnnnnnnnnnnnnnnnnnnnnnnnnnnnnnnnnnnnnnnnnnnnnnnnnnnnnnnnnnnnnnnnnnnnnnnnnnnnnnnnnnnnnnnnnnnnnnnnnnnnnnnnnnnnnnnnnnnnnnnnnnnnnnnnnnnnnnnnnnnnnnnnnnnnnnnnnnnnnnnnnnnnnnnnnnnnnnnnnnnnnnnnnnnnnnnnnnnnnnnnnnnnnnnnnnnnnnnnnnnnnnnnnnnnnnnnnnnnnnnnnnnnnnnnnnnnnnnnnnnnnnnnnnnnnnnnnnnnnnnnnnnnnnnnnnnnnnnnnnnnnnnnnnnnnnnnnnnnnnnnnnnnnnnnnnnnnnnnnnnnnnnnnnnnnnnnnnnnnnnnnnnnnnnnnnnnnnnnnnnnnnnnnnnnnnnnnnnnnnnnnnnnnnnnnnnnnnnnnnnnnnnnnnnnnnnnnnnnnnnnnnnnnnnnnnnnnnnnnnnnnnnnnnnnnnnnnnnnnnnnnnnnnnnnnnnnnnnnnnnnnnnnnnnnnnnnnnnnnnnnnnnnnnnnnnnnnnnnnnnnnnnnnnnnnnnnnnnnnnnnnnnnnnnnnnnnnnnnnnnnnnnnnnnnnnnnnnnnnnnnnnnnnnnnnnnnnnnnnnnnnnnnnnnnnnnnnnnnnnnnnnnnnnnnnnnnnnnnnnnnnnnnnnnnnnnnnnnnnnnnnnnnnnnnnnnnnnnnnnnnnnnnnnnnnnnnnnnnnnnnnnnnnnnnnnnnnnnnnnnnnnnnnnnnnnnnnnnnnnnnnnnnnnnnnnnnnnnnnnnnnnnnnnnnnnnnnnnnnnnnnnnnnnnnnnnnnnnnnnnnnnnnnnnnnnnnnnnnnnnnnnnnnnnnnnnnnnnnnnnnnnnnnnnnnnnnnnnnnnnnnnnnnnnnnnnnnnnnnnnnnnnnnnnnnnnnnnnnnnnnnnnnnnnnnnnnnnnnnnnnnnnnnnnnnnnnnnnnnnnnnnnnnnnnnnnnnnnnnnnnnnnnnnnnnnnnnnnnnnnnnnnnnnnnnnnnnnnnnnnnnnnnnnnnnnnnnnnnnnnnnnnnnnnnnnnnnnnnnnnnnnnnnnnnnnnnnnnnnnnnnnnnnnnnnnnnnnnnnnnnnnnnnnnnnnnnnnnnnnnnnnnnnnnnnnnnnnnnnnnnnnnnnnnnnnnnnnnnnnnnnnnnnnnnnnnnnnnnnnnnnnnnnnnnnnnnnnnnnnnnnnnnnnnnnnnnnnnnnnnnnnnnnnnnnnnnnnnnnnnnnnnnnnnnnnnnnnnnnnnnnnnnnnnnnnnnnnnnnnnnnnnnnnnnnnnnnnnnnnnnnnnnnnnnnnnnnnnnnnnnnnnnnnnnnnnnnnnnnnnnnnnnnnnnnnnnnnnnnnnnnnnnnnnnnnnnnnnnnnnnnnnnnnnnnnnnnnnnnnnnnnnnnnnnnnnnnnnnnnnnnnnnnnnnnnnnnnnnnnnnnnnnnnnnnnnnnnnnnnnnnnnnnnnnnnnnnnnnnnnnnnnnnnnnnnnnnnnnnnnnnnnnnnnnnnnnnnnnnnnnnnnnnnnnnnnnnnnnnnnnnnnnnnnnnnnnnnnnnnnnnnnnnnnnnnnnnnnnnnnnnnnnnnnnnnnnnnnnnnnnnnnnnnnnnnnnnnnnnnnnnnnnnnnnnnnnnnnnnnnnnnnnnnnnnnnnnnnnnnnnnnnnnnnnnnnnnnnnnnnnnnnnnnnnnnnnnnnnnnnnnnnnnnnnnnnnnnnnnnnnnnnnnnnnnnnnnnnnnnnnnnnnnnnnnnnnnnnnnnnnnnnnnnnnnnnnnnnnnnnnnnnnnnnnnnnnnnnnnnnnnnnnnnnnnnnnnnnnnnnnnnnnnnnnnnnnnnnnnnnnnnnnnnnnnnnnnnnnnnnnnnnnnnnnnnnnnnnnnnnnnnnnnnnnnnnnnnnnnnnnnnnnnnnnnnnnnnnnnnnnnnnnnnnnnnnnnnnnnnnnnnnnnnnnnnnnnnnnnnnnnnnnnnnnnnnnnnnnnnnnnnnnnnnnnnnnnnnnnnnnnnnnnnnnnnnnnnnnnnnnnnnnnnnnnnnnnnnnnnnnnnnnnnnnnnnnnnnnnnnnnnnnnnnnnnnnnnnnnnnnnnnnnnnnnnnnnnnnnnnnnnnnnnnnnnnnnnnnnnnnnnnnnnnnnnnnnnnnnnnnnnnnnnnnnnnnnnnnnnnnnnnnnnnnnnnnnnnnnnnnnnnnnnnnnnnnnnnnnnnnnnnnnnnnnnnnnnnnnnnnnnnnnnnnnnnnnnnnnnnnnnnnnnnnnnnnnnnnnnnnnnnnnnnnnnnnnnnnnnnnnnnnnnnnnnnnnnnnnnnnnnnnnnnnnnnnnnnnnnnnnnnnnnnnnnnnnnnnnnnnnnnnnnnnnnnnnnnnnnnnnnnnnnnnnnnnnnnnnnnnnnnnnnnnnnnnnnnnnnnnnnnnnnnnnnnnnnnnnnnnnnnnnnnnnnnnnnnnnnnnnnnnnnnnnnnnnnnnnnnnnnnnnnnnnnnnnnnnnnnnnnnnnnnnnnnnnnnnnnnnnnnnnnnnnnnnnnnnnnnnnnnnnnnnnnnnnnnnnnnnnnnnnnnnnnnnnnnnnnnnnnnnnnnnnnnnnnnnnnnnnnnnnnnnnnnnnnnnnnnnnnnnnnnnnnnnnnnnnnnnnnnnnnnnnnnnnnnnnnnnnnnnnnnnnnnnnnnnnnnnnnnnnnnnnnnnnnnnnnnnnnnnnnnnnnnnnnnnnnnnnnnnnnnnnnnnnnnnnnnnnnnnnnnnnnnnnnnnnnnnnnnnnnnnnnnnnnnnnnnnnnnnnnnnnnnnnnnnnnnnnnnnnnnnnnnnnnnnnnnnnnnnnnnnnnnnnnnnnnnnnnnnnnnnnnnnnnnnnnnnnnnnnnnnnnnnnnnnnnnnnnnnnnnnnnnnnnnnnnnnnnnnnnnnnnnnnnnnnnnnnnnnnnnnnnnnnnnnnnnnnnnnnnnnnnnnnnnnnnnnnnnnnnnnnnnnnnnnnnnnnnnnnnnnnnnnnnnnnnnnnnnnnnnnnnnnnnnnnnnnnnnnnnnnnnnnnnnnnnnnnnnnnnnnnnnnnnnnnnnnnnnnnnnnnnnnnnnnnnnnnnnnnnnnnnnnnnnnnnnnnnnnnnnnnnnnnnnnnnnnnnnnnnnnnnnnnnnnnnnnnnnnnnnnnnnnnnnnnnnnnnnnnnnnnnnnnnnnnnnnnnnnnnnnnnnnnnnnnnnnnnnnnnnnnnnnnnnnnnnnnnnnnnnnnnnnnnnnnnnnnnnnnnnnnnnnnnnnnnnnnnnnnnnnnnnnnnnnnnnnnnnnnnnnnnnnnnnnnnnnnnnnnnnnnnnnnnnnnnnnnnnnnnnnnnnnnnnnnnnnnnnnnnnnnnnnnnnnnnnnnnnnnnnnnnnnnnnnnnnnnnnnnnnnnnnnnnnnnnnnnnnnnnnnnnnnnnnnnnnnnnnnnnnnnnnnnnnnnnnnnnnnnnnnnnnnnnnnnnnnnnnnnnnnnnnnnnnnnnnnnnnnnnnnnnnnnnnnnnnnnnnnnnnnnnnnnnnnnnnnnnnnnnnnnnnnnnnnnnnnnnnnnnnnnnnnnnnnnnnnnnnnnnnnnnnnnnnnnnnnnnnnnnnnnnnnnnnnnnnnnnnnnnnnnnnnnnnnnnnnnnnnnnnnnnnnnnnnnnnnnnnnnnnnnnnnnnnnnnnnnnnnnnnnnnnnnnnnnnnnnnnnnnnnnnnnnnnnnnnnnnnnnnnnnnnnnnnnnnnnnnnnnnnnnnnnnnnnnnnnnnnnnnnnnnnnnnnnnnnnnnnnnnnnnnnnnnnnnnnnnnnnnnnnnnnnnnnnnnnnnnnnnnnnnnnnnnnnnnnnnnnnnnnnnnnnnnnnnnnnnnnnnnnnnnnnnnnnnnnnnnnnnnnnnnnnnnnnnnnnnnnnnnnnnnnnnnnnnnnnnnnnnnnnnnnnnnnnnnnnnnnnnnnnnnnnnnnnnnnnnnnnnnnnnnnnnnnnnnnnnnnnnnnnnnnnnnnnnnnnnnnnnnnnnnnnnnnnnnnnnnnnnnnnnnnnnnnnnnnnnnnnnnnnnnnnnnnnnnnnnnnnnnnnnnnnnnnnnnnnnnnnnnnnnnnnnnnnnnnnnnnnnnnnnnnnnnnnnnnnnnnnnnnnnnnnnnnnnnnnnnnnnnnnnnnnnnnnnnnnnnnnnnnnnnnnnnnnnnnnnnnnnnnnnnnnnnnnnnnnnnnnnnnnnnnnnnnnnnnnnnnnnnnnnnnnnnnnnnnnnnnnnnnnnnnnnnnnnnnnnnnnnnnnnnnnnnnnnnnnnnnnnnnnnnnnnnnnnnnnnnnnnnnnnnnnnnnnnnnnnnnnnnnnnnnnnnnnnnnnnnnnnnnnnnnnnnnnnnnnnnnnnnnnnnnnnnnnnnnnnnnnnnnnnnnnnnnnnnnnnnnnnnnnnnnnnnnnnnnnnnnnnnnnnnnnnnnnnnnnnnnnnnnnnnnnnnnnnnnnnnnnnnnnnnnnnnnnnnnnnnnnnnnnnnnnnnnnnnnnnnnnnnnnnnnnnnnnnnnnnnnnnnnnnnnnnnnnnnnnnnnnnnnnnnnnnnnnnnnnnnnnnnnnnnnnnnnnnnnnnnnnnnnnnnnnnnnnnnnnnnnnnnnnnnnnnnnnnnnnnnnnnnnnnnnnnnnnnnnnnnnnnnnnnnnnnnnnnnnnnnnnnnnnnnnnnnnnnnnnnnnnnnnnnnnnnnnnnnnnnnnnnnnnnnnnnnnnnnnnnnnnnnnnnnnnnnnnnnnnnnnnnnnnnnnnnnnnnnnnnnnnnnnnnnnnnnnnnnnnnnnnnnnnnnnnnnnnnnnnnnnnnnnnnnnnnnnnnnnnnnnnnnnnnnnnnnnnnnnnnnnnnnnnnnnnnnnnnnnnnnnnnnnnnnnnnnnnnnnnnnnnnnnnnnnnnnnnnnnnnnnnnnnnnnnnnnnnnnnnnnnnnnnnnnnnnnnnnnnnnnnnnnnnnnnnnnnnnnnnnnnnnnnnnnnnnnnnnnnnnnnnnnnnnnnnnnnnnnnnnnnnnnnnnnnnnnnnnnnnnnnnnnnnnnnnnnnnnnnnnnnnnnnnnnnnnnnnnnnnnnnnnnnnnnnnnnnnnnnnnnnnnnnnnnnnnnnnnnnnnnnnnnnnnnnnnnnnnnnnnnnnnnnnnnnnnnnnnnnnnnnnnnnnnnnnnnnnnnnnnnnnnnnnnnnnnnnnnnnnnnnnnnnnnnnnnnnnnnnnnnnnnnnnnnnnnnnnnnnnnnnnnnnnnnnnnnnnnnnnnnnnnnnnnnnnnnnnnnnnnnnnnnnnnnnnnnnnnnnnnnnnnnnnnnnnnnnnnnnnnnnnnnnnnnnnnnnnnnnnnnnnnnnnnnnnnnnnnnnnnnnnnnnnnnnnnnnnnnnnnnnnnnnnnnnnnnnnnnnnnnnnnnnnnnnnnnnnnnnnnnnnnnnnnnnnnnnnnnnnnnnnnnnnnnnnnnnnnnnnnnnnnnnnnnnnnnnnnnnnnnnnnnnnnnnnnnnnnnnnnnnnnnnnnnnnnnnnnnnnnnnnnnnnnnnnnnnnnnnnnnnnnnnnnnnnnnnnnnnnnnnnnnnnnnnnnnnnnnnnnnnnnnnnnnnnnnnnnnnnnnnnnnnnnnnnnnnnnnnnnnnnnnnnnnnnnnnnnnnnnnnnnnnnnnnnnnnnnnnnnnnnnnnnnnnnnnnnnnnnnnnnnnnnnnnnnnnnnnnnnnnnnnnnnnnnnnnnnnnnnnnnnnnnnnnnnnnnnnnnnnnnnnnnnnnnnnnnnnnnnnnnnnnnnnnnnnnnnnnnnnnnnnnnnnnnnnnnnnnnnnnnnnnnnnnnnnnnnnnnnnnnnnnnnnnnnnnnnnnnnnnnnnnnnnnnnnnnnnnnnnnnnnnnnnnnnnnnnnnnnnnnnnnnnnnnnnnnnnnnnnnnnnnnnnnnnnnnnnnnnnnnnnnnnnnnnnnnnnnnnnnnnnnnnnnnnnnnnnnnnnnnnnnnnnnnnnnnnnnnnnnnnnnnnnnnnnnnnnnnnnnnnnnnnnnnnnnnnnnnnnnnnnnnnnnnnnnnnnnnnnnnnnnnnnnnnnnnnnnnnnnnnnnnnnnnnnnnnnnnnnnnnnnnnnnnnnnnnnnnnnnnnnnnnnnnnnnnnnnnnnnnnnnnnnnnnnnnnnnnnnnnnnnnnnnnnnnnnnnnnnnnnnnnnnnnnnnnnnnnnnnnnnnnnnnnnnnnnnnnnnnnnnnnnnnnnnnnnnnnnnnnnnnnnnnnnnnnnnnnnnnnnnnnnnnnnnnnnnnnnnnnnnnnnnnnnnnnnnnnnnnnnnnnnnnnnnnnnnnnnnnnnnnnnnnnnnnnnnnnnnnnnnnnnnnnnnnnnnnnnnnnnnnnnnnnnnnnnnnnnnnnnnnnnnnnnnnnnnnnnnnnnnnnnnnnnnnnnnnnnnnnnnnnnnnnnnnnnnnnnnnnnnnnnnnnnnnnnnnnnnnnnnnnnnnnnnnnnnnnnnnnnnnnnnnnnnnnnnnnnnnnnnnnnnnnnnnnnnnnnnnnnnnnnnnnnnnnnnnnnnnnnnnnnnnnnnnnnnnnnnnnnnnnnnnnnnnnnnnnnnnnnnnnnnnnnnnnnnnnnnnnnnnnnnnnnnnnnnnnnnnnnnnnnnnnnnnnnnnnnnnnnnnnnnnnnnnnnnnnnnnnnnnnnnnnnnnnnnnnnnnnnnnnnnnnnnnnnnnnnnnnnnnnnnnnnnnnnnnnnnnnnnnnnnnnnnnnnnnnnnnnnnnnnnnnnnnnnnnnnnnnnnnnnnnnnnnnnnnnnnnnnnnnnnnnnnnnnnnnnnnnnnnnnnnnnnnnnnnnnnnnnnnnnnnnnnnnnnnnnnnnnnnnnnnnnnnnnnnnnnnnnnnnnnnnnnnnnnnnnnnnnnnnnnnnnnnnnnnnnnnnnnnnnnnnnnnnnnnnnnnnnnnnnnnnnnnnnnnnnnnnnnnnnnnnnnnnnnnnnnnnnnnnnnnnnnnnnnnnnnnnnnnnnnnnnnnnnnnnnnnnnnnnnnnnnnnnnnnnnnnnnnnnnnnnnnnnnnnnnnnnnnnnnnnnnnnnnnnnnnnnnnnnnnnnnnnnnnnnnnnnnnnnnnnnnnnnnnnnnnnnnnnnnnnnnnnnnnnnnnnnnnnnnnnnnnnnnnnnnnnnnnnnnnnnnnnnnnnnnnnnnnnnnnnnnnnnnnnnnnnnnnnnnnnnnnnnnnnnnnnnnnnnnnnnnnnnnnnnnnnnnnnnnnnnnnnnnnnnnnnnnnnnnnnnnnnnnnnnnnnnnnnnnnnnnnnnnnnnnnnnnnnnnnnnnnnnnnnnnnnnnnnnnnnnnnnnnnnnnnnnnnnnnnnnnnnnnnnnnnnnnnnnnnnnnnnnnnnnnnnnnnnnnnnnnnnnnnnnnnnnnnnnnnnnnnnnnnnnnnnnnnnnnnnnnnnnnnnnnnnnnnnnnnnnnnnnnnnnnnnnnnnnnnnnnnnnnnnnnnnnnnnnnnnnnnnnnnnnnnnnnnnnnnnnnnnnnnnnnnnnnnnnnnnnnnnnnnnnnnnnnnnnnnnnnnnnnnnnnnnnnnnnnnnnnnnnnnnnnnnnnnnnnnnnnnnnnnnnnnnnnnnnnnnnnnnnnnnnnnnnnnnnnnnnnnnnnnnnnnnnnnnnnnnnnnnnnnnnnnnnnnnnnnnnnnnnnnnnnnnnnnnnnnnnnnnnnnnnnnnnnnnnnnnnnnnnnnnnnnnnnnnnnnnnnnnnnnnnnnnnnnnnnnnnnnnnnnnnnnnnnnnnnnnnnnnnnnnnnnnnnnnnnnnnnnnnnnnnnnnnnnnnnnnnnnnnnnnnnnnnnnnnnnnnnnnnnnnnnnnnnnnnnnnnnnnnnnnnnnnnnnnnnnnnnnnnnnnnnnnnnnnnnnnnnnnnnnnnnnnnnnnnnnnnnnnnnnnnnnnnnnnnnnnnnnnnnnnnnnnnnnnnnnnnnnnnnnnnnnnnnnnnnnnnnnnnnnnnnnnnnnnnnnnnnnnnnnnnnnnnnnnnnnnnnnnnnnnnnnnnnnnnnnnnnnnnnnnnnnnnnnnnnnnnnnnnnnnnnnnnnnnnnnnnnnnnnnnnnnnnnnnnnnnnnnnnnnnnnnnnnnnnnnnnnnnnnnnnnnnnnnnnnnnnnnnnnnnnnnnnnnnnnnnnnnnnnnnnnnnnnnnnnnnnnnnnnnnnnnnnnnnnnnnnnnnnnnnnnnnnnnnnnnnnnnnnnnnnnnnnnnnnnnnnnnnnnnnnnnnnnnnnnnnnnnnnnnnnnnnnnnnnnnnnnnnnnnnnnnnnnnnnnnnnnnnnnnnnnnnnnnnnnnnnnnnnnnnnnnnnnnnnnnnnnnnnnnnnnnnnnnnnnnnnnnnnnnnnnnnnnnnnnnnnnnnnnnnnnnnnnnnnnnnnnnnnnnnnnnnnnnnnnnnnnnnnnnnnnnnnnnnnnnnnnnnnnnnnnnnnnnnnnnnnnnnnnnnnnnnnnnnnnnnnnnnnnnnnnnnnnnnnnnnnnnnnnnnnnnnnnnnnnnnnnnnnnnnnnnnnnnnnnnnnnnnnnnnnnnnnnnnnnnnnnnnnnnnnnnnnnnnnnnnnnnnnnnnnnnnnnnnnnnnnnnnnnnnnnnnnnnnnnnnnnnnnnnnnnnnnnnnnnnnnnnnnnnnnnnnnnnnnnnnnnnnnnnnnnnnnnnnnnnnnnnnnnnnnnnnnnnnnnnnnnnnnnnnnnnnnnnnnnnnnnnnnnnnnnnnnnnnnnnnnnnnnnnnnnnnnnnnnnnnnnnnnnnnnnnnnnnnnnnnnnnnnnnnnnnnnnnnnnnnnnnnnnnnnnnnnnnnnnnnnnnnnnnnnnnnnnnnnnnnnnnnnnnnnnnnnnnnnnnnnnnnnnnnnnnnnnnnnnnnnnnnnnnnnnnnnnnnnnnnnnnnnnnnnnnnnnnnnnnnnnnnnnnnnnnnnnnnnnnnnnnnnnnnnnnnnnnnnnnnnnnnnnnnnnnnnnnnnnnnnnnnnnnnnnnnnnnnnnnnnnnnnnnnnnnnnnnnnnnnnnnnnnnnnnnnnnnnnnnnnnnnnnnnnnnnnnnnnnnnnnnnnnnnnnnnnnnnnnnnnnnnnnnnnnnnnnnnnnnnnnnnnnnnnnnnnnnnnnnnnnnnnnnnnnnnnnnnnnnnnnnnnnnnnnnnnnnnnnnnnnnnnnnnnnnnnnnnnnnnnnnnnnnnnnnnnnnnnnnnnnnnnnnnnnnnnnnnnnnnnnnnnnnnnnnnnnnnnnnnnnnnnnnnnnnnnnnnnnnnnnnnnnnnnnnnnnnnnnnnnnnnnnnnnnnnnnnnnnnnnnnnnnnnnnnnnnnnnnnnnnnnnnnnnnnnnnnnnnnnnnnnnnnnnnnnnnnnnnnnnnnnnnnnnnnnnnnnnnnnnnnnnnnnnnnnnnnnnnnnnnnnnnnnnnnnnnnnnnnnnnnnnnnnnnnnnnnnnnnnnnnnnnnnnnnnnnnnnnnnnnnnnnnnnnnnnnnnnnnnnnnnnnnnnnnnnnnnnnnnnnnnnnnnnnnnnnnnnnnnnnnnnnnnnnnnnnnnnnnnnnnnnnnnnnnnnnnnnnnnnnnnnnnnnnnnnnnnnnnnnnnnnnnnnnnnnnnnnnnnnnnnnnnnnnnnnnnnnnnnnnnnnnnnnnnnnnnnnnnnnnnnnnnnnnnnnnnnnnnnnnnnnnnnnnnnnnnnnnnnnnnnnnnnnnnnnnnnnnnnnnnnnnnnnnnnnnnnnnnnnnnnnnnnnnnnnnnnnnnnnnnnnnnnnnnnnnnnnnnnnnnnnnnnnnnnnnnnnnnnnnnnnnnnnnnnnnnnnnnnnnnnnnnnnnnnnnnnnnnnnnnnnnnnnnnnnnnnnnnnnnnnnnnnnnnnnnnnnnnnnnnnnnnnnnnnnnnnnnnnnnnnnnnnnnnnnnnnnnnnnnnnnnnnnnnnnnnnnnnnnnnnnnnnnnnnnnnnnnnnnnnnnnnnnnnnnnnnnnnnnnnnnnnnnnnnnnnnnnnnnnnnnnnnnnnnnnnnnnnnnnnnnnnnnnnnnnnnnnnnnnnnnnnnnnnnnnnnnnnnnnnnnnnnnnnnnnnnnnnnnnnnnnnnnnnnnnnnnnnnnnnnnnnnnnnnnnnnnnnnnnnnnnnnnnnnnnnnnnnnnnnnnnnnnnnnnnnnnnnnnnnnnnnnnnnnnnnnnnnnnnnnnnnnnnnnnnnnnnnnnnnnnnncatatagtagatgcaagaatcgttccgaatctgccacaataactgcggattcctttcccaaagcctttttcgcccacggacaggccgtttgccccttcccactaacatcccgtaaacctccccttaaattcccgcccggccaatgggaactcagcgggaagtattttagatgtgtatgggatggggcaaatggggcttctattgatagtgggtatcaaaatgggaggaagtccacaaattgcgcgaattcatacgaattgcttttccagttacgctaccaactgtggtagataacctaaaataaaggacttacttcccaatcgggcaagtaatccatatgtttggagcccgaaggtcccagaacgattggccgacggggacatcgaccttcctgacgctggcgtcgagcgaggcacgagcatggacgccagcaacatctcctgtagtccatactcgcaagctcgctgcactccaggctcaccaacgttggaaggcaaattcacaaattcacaaccggtaaatatggcttgtgaatttgcaacctgctgatagacgggtaattatgaggctaattcacaaaaaaggggtctcttatacatccgcggaagccgattgtaaacaggatatgatgtatccacgctaccagtctataatacatatagaaatagtatatataatatataatagtattatatattattatatattgatattatatcatctctaccttcccttcatctcttgtttgcggcatgagccactgcaaaccggcattctcccctggtccggctggatataagagataagcgtattttgtgaatttgtcccccaactcactgtgccacaataacacacggattcacaagccatatttaccggttgtgaatttgtgaatctgaccttgccggccttaaggaagtttgaaattagagccctattttggacttgacaaattattccttggtaaatttggtgtataatagctatggggcataatgatgttagcctgtggaacggcctctgtaaaggatcaacaagctatcaaccctccccatgcgacaggagcttcaatgtattataatttgacagacaaaccctggatcagtgtgctacagcttgacgggcattctgccaggctcggcctggctgaggtcctgcgaaaagcacacacactgcgtttggcttacggcaatccgatggaccgcatgtccgttttccgtttcctcctcgccctgggctattggtgttttgccaatacaaaacaagcgccggtatcagataagccactgcctcaggcatggacggactggcttgaacaaaaccaagaatatttcgaattgttcggtgatggccccagattctaccaatccccaggaacatccagaatacgccccagcacggaccttatccacgagcttcccacggcaaacaatttctggcacttccgccatgtgaccgatttcatcgatggcatttgcccagcttgctgcgttaccggtctgctgcgcctgccactctttaccaccgtaggcggcagcggaatcggagccggcatcaacagaactcctcccttctatgccatctggcagggtgatagtctgtcggaatcgatattcctgaattgggaacccacttcccggttgggtgttcctgcctggctgaacccgtttggatcccaaaacgagaaggatgtagccttgctgactggcctcacctggctgccccgcaaggtattcctgcttggcccggtgtcagacggagcaaaatgcagcgcctgcggagaagagcatgagcctctggtctatgcctgcaacaatgaggcggtgaaagtgcctccgaaccttgtctggaacgaccctcacgcgatttaccgggatgacaataatggcctgactgcccaggtggctctgatgtccggggacaaatacactttcgctaacagggattggcataaacccctggtcggcttcttacgggcgaaaggcatgtctcggaccgccacgctgtttttagtgggcttcacaagcgttcaagccaaatgtgtggacgtttgggaaaagaccattgccctatccggaaaaacaagctccgaggaactgctggaccagatatccgaaagagcctactccctgcacaggatgaggaaacaagaccgccggggcgattacaaggaatccgtgggaatcaccgccgtggcggacatcatcccgcacgtagagcatcgggttgacgtccattcgggcgagatggtggaaaacagcggcaatgtctggcaggaagcggatgaagattacggattcttcatgaagcgttttgccgtttctctagtgccggaaattacggttgccgccaagcttgaacgagaacaactggctcggcgcaagccctggcccctaaaaccaaaatcaattaaaaaaccttcatccggaggcgataatgaatgagagcaccgtgaaatttgttcggagcctgggcgaactcaaagagggcgacctgggcttgctcagaaagctcaggggtcgccgtctggatgaatccctgccgggtttcgacctgttttccggcctgtggtggccactccgcagtataagccccaaaacccccaggcggaaggtggtctggctagtcaccaagcttttcgcggaattccgctttgagcaaaagaaaggcgccagcctgccttggctcatgggcagaatatgccgtggacttaaagaagaaaaagagttcccacgtgttttagccaggttcgaccgcttgctcacgctcgagttgaaccaactggaggaaccgctggcgcaagtgctcgcgattttaaaaagacatgacattgccagtctggactgggttgccctcatcgatgacctctccgcttgggaacgggaatcaaacagagcgatatggtcagacacatttatttcagcatttaataatcagcaaggaggaatcaaatgttgattgaaatacacatgatccaaaaccacagcccggccaacctgaaccgggacgacctgggcgcgcccaagacctgttatttcggtggggtgttgcggtcccgcatctccagccagtgcctaaagcggagcatcaggatgagcgatgaattcaaaaacttgctcgggggtatccgtacccgtcggttggccgagttgattacaaaagctacaggacaggactgcaggaatcaggcagaggaagttctgaacaaagccggtttgaaacacgaaaacggacatagtaagatgctggtgttcatgacccggaacaagatcgatgcccttgctcaaattgtcaccagcgaaggcctgagtgttgcagagaaagccaagaaagcggcagatgtaatatcgggggcaatacattcccctgacatcgctctgtgcggaagaatgctcgagcccgataccaaggacaagaacacagacaaggtcaagtgggaaaataccactgttgaagcagccctgcaggtgtcgcacgccatttcaacccacatcgcccgcccagaaatagattactatgtagcagctgatgacgagcctggcgacgacacaggtgctggattcatagacgaggcgatgtttgcttcggcctgtttctacaaatattactcaattgattggaataccttgataatcaacctccagggtaatgaaaagttggcagctcatactgtcggagcctttatccaggccgctgcactcactaatcccagcggaaagcagaacagctttgccgcacataaccttcccgatggaatattggtagaaataaaagagacacctgtcagctatgcaaatgcctttgtgcgaccggtgggaatcgttaaggattctgacttggtagaacaaagcattggccaactggccaactatgtgaaggatataagtgccggtttcttccctggacagatgaaaggcaacgctctgtggttctcgcccaatggacgttatcccctaaagcctcaacagggcacgctggacataaagccagtttgcaacctgctagaacttgttcgcgaagcagttgagatgttgggttttgaatgggatgatgtaaaaaacgagaaagtagagagttgaaatgtcttctccgcctaataccctgttcctgagattggaggctccccttcaggcctggggaagcaatgaggccaaattcgccgtgcgcaggacagccgacgcgcccaccaaatccggagtggcaggcctgctctgcgctgccctgggaatcagccgggccgaagccggacagtattggctgggtgaaattgccaaattgcgcatgggggtgcggatagaccgcccgggcatccgctggtgggattaccatactgtgggagcggagcagaagctgcgcatttctgacctgaaaatgcccaacggcctagttctggttggcactgccctggccaaaaacctgggcgcggacaagatcaaatccaaacccggggctttgctctcccgacgcgagtatttggctgatgccagcttcctggttgcgctccagggtgaaccggatatcgtggcacaactggctgaagcgctgaaaaaaccagtctggacgctttatctggggcgaaaatcctgtcccccctcccgtccggtggatgaacacccgccagggttttatgccagtctgaaagaggctttgcggtcgatcccggcgcaactgagggaaaaaggcgaaccgatacctgacagtgttccctgtgtgctcgactgggttccggcccatgatgacgtgcacgctccgccgaacgccgaagcgcattacgacgtgccggtgtcctttgagcctccccaccacttgccccggctggtgatccgctgtaacctgccattggaccgcaacttcgaggcagagaccgtgctttccggcaaagcctggcaaccgccccgcaaccgggcaaattacgacaatcctgaatacaaaagggtccgcgctgagcgtttggtgatggacaatgccgcctgcatgttctgcaaggcacccgccactactgtgcagcacgtgaattaccgacgcgccggaggcagcgagaagccggaggacttgcgcgccctctgccgcctctgccacgatgcctgcaccatgctggaatatggcagcggcatgaccatggaccgcatagatccctgtgaccccgcctggcgtgagcgcatcttggccaaacgcgaggaaataatcaaattccgctcgctggagcagcgcaggcgcaaactcgatccgaaggaggagaacggatgatgtatctatcccaactgctcatcgacacaggcggcaaccctgaccggccaaggcccgggcgcttgtggctgaacaatatctataatgtccaccggcggctcagcatggctttccccatgcgcaagcgcaaggaaggagacccgaggtttctgcagccctttgaccccgcagattttgaaaagcgccagttcctctttcgggtggacaacaacaccgatggagaaaatcaaagggcgatggttttggtgcagtcgtccctgccgccggattgggactgggctttccagaatgccacgggatttttggcagcccctccccaggttaaggaatacgatccccagttctcagcaggtcagcggctgcgcttccgcatcctcgtgaatgccagtgtcaaacgcaaaatcgacgagttgcgggaaggacccggaggaaaggaaaaaacgggaagggttctgcacaaacgggtcgcccttacctgggacacaaattccaacccaaaggatgcggtggcgcaatggtttgccgccaaggctggcagactgggcttcacgcccggggagaccgaactggtaagcctgggctgggtatacggttccaaaccggagccccggggaaattcgccccggcgtgagaacgaataccgtcccctgagataccgttccgccctgctggaaggttatctgacagtggatgatgcctttctgttccgggaagccttggaaaaaggtatcggcagcgccaaaggaatgggcttcggcctcctttccgtggttccggcaagtgatgcgtaacagagaccttcacctaatgccaaaaatgcgggaccgcttcacctatctctatgtggagcatgccaaaatagacaaagaacaacaggcaatcgcctttcacgatgccatgggctccactcctgttccctgcgctggactggccctgctgatgctggggccaggcgtatccatcacccatgcggccatccttgttttagcagaatgcggctgtttggtggcttgggtgggggaacagggagtccgcttttactcatccgggacagggaccacccgtagttccgccaaccttatgcgtcaggctgccgcctggtcaaatcgagatacgcatctgcggatagttcgcagaatgtatgaattgaggttcaaggaaaaactggacccaaccctctctcttgaacagataaggggaaaagagggagcgagagtacgggatacctatttcagactttcaaaagaattcgatgtgcccatgagtgcgaggaattacgacaggagcaactggaataaaaccgaccccatcaacagagccctgtccgttgccaattcctgtctctatggcatctgccacgccgcgatagtggccgctggctattcacctgccctgggtttcgttcatactggcaaacaactgtcatttgtttatgacattgccgatctttataaaatggaaacctccgtgcccgcggctttcatagccacagccgcaggggtcgataacctggacagaaggacacgcattgcctgccgtgaccagttctatcaatttggtctgctaaagaagatagtggccgacattcacgcccttttcggtattctggaaacttcggacgatgagccagaccttgctgatgtcgatccagccgtgccaggcgggctttggaacccagatgataaagtgagccccggcggcttgtcatggggtctggatgatcctggaggccatgatgatggttctggtgcttgaaaaagttccctctggcctgagaggagaaattacacgctggctcctcgaaatcaaggctggagtatttgtcggtcaggtatcggccatgataagggaaaagctgtgggacaaggccaggtctggttgtgccggtggaacttgtatcatgatttacagcaagcattgcgaacaaggctttggaattgagttttggggtgccgcggaaaggatagtgacagaatgggaaggattgaaattgatgaccaagcatccgtgatccatacttgaagcctgttcaatggcctcaaagcttctactttcgaagtgtattccccacctgcgtgggggtgaaccggtgtagagattgtcggagtcgtcgcgccaggcgtattccccacctgcgtgggggtgaaccgggagctgggaccatgttctggtcccgtctcccgtattccccacctgcgtgggggtgaaccgggggccgggagtggcgagaccggcgacttggcgtattccccacctgcgtgggggtgaaccgtgggttgatgctaacggggattacatcaagaggtattccccacctgcgtgggggtgaaccggggtcagaaccatatcattgttatagttctcgcgtattccccacctgcgtgggggtgaaccggggtcagacgacagcctgagcgagttcaacttgtattccccacctgcgtgggggtgaaccgcaggccttgctcatgctccacgagtgggacatgtattccccacctgcgtgggggtgaaccgggattttttctgtcaaaattcttcgcatacccgtattccccacctgcgtgggggtgaaccgggtaagagagacggacgcccctggctcaaaccgtattccccacctgcgtgggggtgaaccggacgcgagtgaactccctgactacgttgtggagtattccccacctgcgtgggggtgaaccgtatgccgtcggagcatacagcggcacgctggagtattccccacctgcgtgggggtgaaccgagatacggtaagaaagactatgcgctcgagcagtattccccacctgcgtgggggtgaaccggcctactggcaatgcgagatcacggatttcccgtattccccacctgcgtggggctaattccatttctgccggcgcacagacggcgccgggcagtccctgataatcgcctacttcagcagcagcatcctgatggttttggtttcgcgggctgtgctcacccgggcgaaatacacaccgctggccactccccttccggtttcatcacgtccgtcccagcgcatcctgtggtttccgcccgcgagttttcctttgtgaagggagcgcactttctggccgcgaatgttgaagagatcgacgctcacctcgtttgagagggcaaggttgaaggcgatggtgac

SEQ ID NO: 1087 - DNA, 105328 bp, Artificial Sequence
  Synthetic Oligonucleotide
  misc_feature (1)..(96975): n is a, c, g, or t
nnnnnnnnnnnnnnnnnnnnnnnnnnnnnnnnnnnnnnnnnnnnnnnnnnnnnnnnnnnnnnnnnnnnnnnnnnnnnnnnnnnnnnnnnnnnnnnnnnnnnnnnnnnnnnnnnnnnnnnnnnnnnnnnnnnnnnnnnnnnnnnnnnnnnnnnnnnnnnnnnnnnnnnnnnnnnnnnnnnnnnnnnnnnnnnnnnnnnnnnnnnnnnnnnnnnnnnnnnnnnnnnnnnnnnnnnnnnnnnnnnnnnnnnnnnnnnnnnnnnnnnnnnnnnnnnnnnnnnnnnnnnnnnnnnnnnnnnnnnnnnnnnnnnnnnnnnnnnnnnnnnnnnnnnnnnnnnnnnnnnnnnnnnnnnnnnnnnnnnnnnnnnnnnnnnnnnnnnnnnnnnnnnnnnnnnnnnnnnnnnnnnnnnnnnnnnnnnnnnnnnnnnnnnnnnnnnnnnnnnnnnnnnnnnnnnnnnnnnnnnnnnnnnnnnnnnnnnnnnnnnnnnnnnnnnnnnnnnnnnnnnnnnnnnnnnnnnnnnnnnnnnnnnnnnnnnnnnnnnnnnnnnnnnnnnnnnnnnnnnnnnnnnnnnnnnnnnnnnnnnnnnnnnnnnnnnnnnnnnnnnnnnnnnnnnnnnnnnnnnnnnnnnnnnnnnnnnnnnnnnnnnnnnnnnnnnnnnnnnnnnnnnnnnnnnnnnnnnnnnnnnnnnnnnnnnnnnnnnnnnnnnnnnnnnnnnnnnnnnnnnnnnnnnnnnnnnnnnnnnnnnnnnnnnnnnnnnnnnnnnnnnnnnnnnnnnnnnnnnnnnnnnnnnnnnnnnnnnnnnnnnnnnnnnnnnnnnnnnnnnnnnnnnnnnnnnnnnnnnnnnnnnnnnnnnnnnnnnnnnnnnnnnnnnnnnnnnnnnnnnnnnnnnnnnnnnnnnnnnnnnnnnnnnnnnnnnnnnnnnnnnnnnnnnnnnnnnnnnnnnnnnnnnnnnnnnnnnnnnnnnnnnnnnnnnnnnnnnnnnnnnnnnnnnnnnnnnnnnnnnnnnnnnnnnnnnnnnnnnnnnnnnnnnnnnnnnnnnnnnnnnnnnnnnnnnnnnnnnnnnnnnnnnnnnnnnnnnnnnnnnnnnnnnnnnnnnnnnnnnnnnnnnnnnnnnnnnnnnnnnnnnnnnnnnnnnnnnnnnnnnnnnnnnnnnnnnnnnnnnnnnnnnnnnnnnnnnnnnnnnnnnnnnnnnnnnnnnnnnnnnnnnnnnnnnnnnnnnnnnnnnnnnnnnnnnnnnnnnnnnnnnnnnnnnnnnnnnnnnnnnnnnnnnnnnnnnnnnnnnnnnnnnnnnnnnnnnnnnnnnnnnnnnnnnnnnnnnnnnnnnnnnnnnnnnnnnnnnnnnnnnnnnnnnnnnnnnnnnnnnnnnnnnnnnnnnnnnnnnnnnnnnnnnnnnnnnnnnnnnnnnnnnnnnnnnnnnnnnnnnnnnnnnnnnnnnnnnnnnnnnnnnnnnnnnnnnnnnnnnnnnnnnnnnnnnnnnnnnnnnnnnnnnnnnnnnnnnnnnnnnnnnnnnnnnnnnnnnnnnnnnnnnnnnnnnnnnnnnnnnnnnnnnnnnnnnnnnnnnnnnnnnnnnnnnnnnnnnnnnnnnnnnnnnnnnnnnnnnnnnnnnnnnnnnnnnnnnnnnnnnnnnnnnnnnnnnnnnnnnnnnnnnnnnnnnnnnnnnnnnnnnnnnnnnnnnnnnnnnnnnnnnnnnnnnnnnnnnnnnnnnnnnnnnnnnnnnnnnnnnnnnnnnnnnnnnnnnnnnnnnnnnnnnnnnnnnnnnnnnnnnnnnnnnnnnnnnnnnnnnnnnnnnnnnnnnnnnnnnnnnnnnnnnnnnnnnnnnnnnnnnnnnnnnnnnnnnnnnnnnnnnnnnnnnnnnnnnnnnnnnnnnnnnnnnnnnnnnnnnnnnnnnnnnnnnnnnnnnnnnnnnnnnnnnnnnnnnnnnnnnnnnnnnnnnnnnnnnnnnnnnnnnnnnnnnnnnnnnnnnnnnnnnnnnnnnnnnnnnnnnnnnnnnnnnnnnnnnnnnnnnnnnnnnnnnnnnnnnnnnnnnnnnnnnnnnnnnnnnnnnnnnnnnnnnnnnnnnnnnnnnnnnnnnnnnnnnnnnnnnnnnnnnnnnnnnnnnnnnnnnnnnnnnnnnnnnnnnnnnnnnnnnnnnnnnnnnnnnnnnnnnnnnnnnnnnnnnnnnnnnnnnnnnnnnnnnnnnnnnnnnnnnnnnnnnnnnnnnnnnnnnnnnnnnnnnnnnnnnnnnnnnnnnnnnnnnnnnnnnnnnnnnnnnnnnnnnnnnnnnnnnnnnnnnnnnnnnnnnnnnnnnnnnnnnnnnnnnnnnnnnnnnnnnnnnnnnnnnnnnnnnnnnnnnnnnnnnnnnnnnnnnnnnnnnnnnnnnnnnnnnnnnnnnnnnnnnnnnnnnnnnnnnnnnnnnnnnnnnnnnnnnnnnnnnnnnnnnnnnnnnnnnnnnnnnnnnnnnnnnnnnnnnnnnnnnnnnnnnnnnnnnnnnnnnnnnnnnnnnnnnnnnnnnnnnnnnnnnnnnnnnnnnnnnnnnnnnnnnnnnnnnnnnnnnnnnnnnnnnnnnnnnnnnnnnnnnnnnnnnnnnnnnnnnnnnnnnnnnnnnnnnnnnnnnnnnnnnnnnnnnnnnnnnnnnnnnnnnnnnnnnnnnnnnnnnnnnnnnnnnnnnnnnnnnnnnnnnnnnnnnnnnnnnnnnnnnnnnnnnnnnnnnnnnnnnnnnnnnnnnnnnnnnnnnnnnnnnnnnnnnnnnnnnnnnnnnnnnnnnnnnnnnnnnnnnnnnnnnnnnnnnnnnnnnnnnnnnnnnnnnnnnnnnnnnnnnnnnnnnnnnnnnnnnnnnnnnnnnnnnnnnnnnnnnnnnnnnnnnnnnnnnnnnnnnnnnnnnnnnnnnnnnnnnnnnnnnnnnnnnnnnnnnnnnnnnnnnnnnnnnnnnnnnnnnnnnnnnnnnnnnnnnnnnnnnnnnnnnnnnnnnnnnnnnnnnnnnnnnnnnnnnnnnnnnnnnnnnnnnnnnnnnnnnnnnnnnnnnnnnnnnnnnnnnnnnnnnnnnnnnnnnnnnnnnnnnnnnnnnnnnnnnnnnnnnnnnnnnnnnnnnnnnnnnnnnnnnnnnnnnnnnnnnnnnnnnnnnnnnnnnnnnnnnnnnnnnnnnnnnnnnnnnnnnnnnnnnnnnnnnnnnnnnnnnnnnnnnnnnnnnnnnnnnnnnnnnnnnnnnnnnnnnnnnnnnnnnnnnnnnnnnnnnnnnnnnnnnnnnnnnnnnnnnnnnnnnnnnnnnnnnnnnnnnnnnnnnnnnnnnnnnnnnnnnnnnnnnnnnnnnnnnnnnnnnnnnnnnnnnnnnnnnnnnnnnnnnnnnnnnnnnnnnnnnnnnnnnnnnnnnnnnnnnnnnnnnnnnnnnnnnnnnnnnnnnnnnnnnnnnnnnnnnnnnnnnnnnnnnnnnnnnnnnnnnnnnnnnnnnnnnnnnnnnnnnnnnnnnnnnnnnnnnnnnnnnnnnnnnnnnnnnnnnnnnnnnnnnnnnnnnnnnnnnnnnnnnnnnnnnnnnnnnnnnnnnnnnnnnnnnnnnnnnnnnnnnnnnnnnnnnnnnnnnnnnnnnnnnnnnnnnnnnnnnnnnnnnnnnnnnnnnnnnnnnnnnnnnnnnnnnnnnnnnnnnnnnnnnnnnnnnnnnnnnnnnnnnnnnnnnnnnnnnnnnnnnnnnnnnnnnnnnnnnnnnnnnnnnnnnnnnnnnnnnnnnnnnnnnnnnnnnnnnnnnnnnnnnnnnnnnnnnnnnnnnnnnnnnnnnnnnnnnnnnnnnnnnnnnnnnnnnnnnnnnnnnnnnnnnnnnnnnnnnnnnnnnnnnnnnnnnnnnnnnnnnnnnnnnnnnnnnnnnnnnnnnnnnnnnnnnnnnnnnnnnnnnnnnnnnnnnnnnnnnnnnnnnnnnnnnnnnnnnnnnnnnnnnnnnnnnnnnnnnnnnnnnnnnnnnnnnnnnnnnnnnnnnnnnnnnnnnnnnnnnnnnnnnnnnnnnnnnnnnnnnnnnnnnnnnnnnnnnnnnnnnnnnnnnnnnnnnnnnnnnnnnnnnnnnnnnnnnnnnnnnnnnnnnnnnnnnnnnnnnnnnnnnnnnnnnnnnnnnnnnnnnnnnnnnnnnnnnnnnnnnnnnnnnnnnnnnnnnnnnnnnnnnnnnnnnnnnnnnnnnnnnnnnnnnnnnnnnnnnnnnnnnnnnnnnnnnnnnnnnnnnnnnnnnnnnnnnnnnnnnnnnnnnnnnnnnnnnnnnnnnnnnnnnnnnnnnnnnnnnnnnnnnnnnnnnnnnnnnnnnnnnnnnnnnnnnnnnnnnnnnnnnnnnnnnnnnnnnnnnnnnnnnnnnnnnnnnnnnnnnnnnnnnnnnnnnnnnnnnnnnnnnnnnnnnnnnnnnnnnnnnnnnnnnnnnnnnnnnnnnnnnnnnnnnnnnnnnnnnnnnnnnnnnnnnnnnnnnnnnnnnnnnnnnnnnnnnnnnnnnnnnnnnnnnnnnnnnnnnnnnnnnnnnnnnnnnnnnnnnnnnnnnnnnnnnnnnnnnnnnnnnnnnnnnnnnnnnnnnnnnnnnnnnnnnnnnnnnnnnnnnnnnnnnnnnnnnnnnnnnnnnnnnnnnnnnnnnnnnnnnnnnnnnnnnnnnnnnnnnnnnnnnnnnnnnnnnnnnnnnnnnnnnnnnnnnnnnnnnnnnnnnnnnnnnnnnnnnnnnnnnnnnnnnnnnnnnnnnnnnnnnnnnnnnnnnnnnnnnnnnnnnnnnnnnnnnnnnnnnnnnnnnnnnnnnnnnnnnnnnnnnnnnnnnnnnnnnnnnnnnnnnnnnnnnnnnnnnnnnnnnnnnnnnnnnnnnnnnnnnnnnnnnnnnnnnnnnnnnnnnnnnnnnnnnnnnnnnnnnnnnnnnnnnnnnnnnnnnnnnnnnnnnnnnnnnnnnnnnnnnnnnnnnnnnnnnnnnnnnnnnnnnnnnnnnnnnnnnnnnnnnnnnnnnnnnnnnnnnnnnnnnnnnnnnnnnnnnnnnnnnnnnnnnnnnnnnnnnnnnnnnnnnnnnnnnnnnnnnnnnnnnnnnnnnnnnnnnnnnnnnnnnnnnnnnnnnnnnnnnnnnnnnnnnnnnnnnnnnnnnnnnnnnnnnnnnnnnnnnnnnnnnnnnnnnnnnnnnnnnnnnnnnnnnnnnnnnnnnnnnnnnnnnnnnnnnnnnnnnnnnnnnnnnnnnnnnnnnnnnnnnnnnnnnnnnnnnnnnnnnnnnnnnnnnnnnnnnnnnnnnnnnnnnnnnnnnnnnnnnnnnnnnnnnnnnnnnnnnnnnnnnnnnnnnnnnnnnnnnnnnnnnnnnnnnnnnnnnnnnnnnnnnnnnnnnnnnnnnnnnnnnnnnnnnnnnnnnnnnnnnnnnnnnnnnnnnnnnnnnnnnnnnnnnnnnnnnnnnnnnnnnnnnnnnnnnnnnnnnnnnnnnnnnnnnnnnnnnnnnnnnnnnnnnnnnnnnnnnnnnnnnnnnnnnnnnnnnnnnnnnnnnnnnnnnnnnnnnnnnnnnnnnnnnnnnnnnnnnnnnnnnnnnnnnnnnnnnnnnnnnnnnnnnnnnnnnnnnnnnnnnnnnnnnnnnnnnnnnnnnnnnnnnnnnnnnnnnnnnnnnnnnnnnnnnnnnnnnnnnnnnnnnnnnnnnnnnnnnnnnnnnnnnnnnnnnnnnnnnnnnnnnnnnnnnnnnnnnnnnnnnnnnnnnnnnnnnnnnnnnnnnnnnnnnnnnnnnnnnnnnnnnnnnnnnnnnnnnnnnnnnnnnnnnnnnnnnnnnnnnnnnnnnnnnnnnnnnnnnnnnnnnnnnnnnnnnnnnnnnnnnnnnnnnnnnnnnnnnnnnnnnnnnnnnnnnnnnnnnnnnnnnnnnnnnnnnnnnnnnnnnnnnnnnnnnnnnnnnnnnnnnnnnnnnnnnnnnnnnnnnnnnnnnnnnnnnnnnnnnnnnnnnnnnnnnnnnnnnnnnnnnnnnnnnnnnnnnnnnnnnnnnnnnnnnnnnnnnnnnnnnnnnnnnnnnnnnnnnnnnnnnnnnnnnnnnnnnnnnnnnnnnnnnnnnnnnnnnnnnnnnnnnnnnnnnnnnnnnnnnnnnnnnnnnnnnnnnnnnnnnnnnnnnnnnnnnnnnnnnnnnnnnnnnnnnnnnnnnnnnnnnnnnnnnnnnnnnnnnnnnnnnnnnnnnnnnnnnnnnnnnnnnnnnnnnnnnnnnnnnnnnnnnnnnnnnnnnnnnnnnnnnnnnnnnnnnnnnnnnnnnnnnnnnnnnnnnnnnnnnnnnnnnnnnnnnnnnnnnnnnnnnnnnnnnnnnnnnnnnnnnnnnnnnnnnnnnnnnnnnnnnnnnnnnnnnnnnnnnnnnnnnnnnnnnnnnnnnnnnnnnnnnnnnnnnnnnnnnnnnnnnnnnnnnnnnnnnnnnnnnnnnnnnnnnnnnnnnnnnnnnnnnnnnnnnnnnnnnnnnnnnnnnnnnnnnnnnnnnnnnnnnnnnnnnnnnnnnnnnnnnnnnnnnnnnnnnnnnnnnnnnnnnnnnnnnnnnnnnnnnnnnnnnnnnnnnnnnnnnnnnnnnnnnnnnnnnnnnnnnnnnnnnnnnnnnnnnnnnnnnnnnnnnnnnnnnnnnnnnnnnnnnnnnnnnnnnnnnnnnnnnnnnnnnnnnnnnnnnnnnnnnnnnnnnnnnnnnnnnnnnnnnnnnnnnnnnnnnnnnnnnnnnnnnnnnnnnnnnnnnnnnnnnnnnnnnnnnnnnnnnnnnnnnnnnnnnnnnnnnnnnnnnnnnnnnnnnnnnnnnnnnnnnnnnnnnnnnnnnnnnnnnnnnnnnnnnnnnnnnnnnnnnnnnnnnnnnnnnnnnnnnnnnnnnnnnnnnnnnnnnnnnnnnnnnnnnnnnnnnnnnnnnnnnnnnnnnnnnnnnnnnnnnnnnnnnnnnnnnnnnnnnnnnnnnnnnnnnnnnnnnnnnnnnnnnnnnnnnnnnnnnnnnnnnnnnnnnnnnnnnnnnnnnnnnnnnnnnnnnnnnnnnnnnnnnnnnnnnnnnnnnnnnnnnnnnnnnnnnnnnnnnnnnnnnnnnnnnnnnnnnnnnnnnnnnnnnnnnnnnnnnnnnnnnnnnnnnnnnnnnnnnnnnnnnnnnnnnnnnnnnnnnnnnnnnnnnnnnnnnnnnnnnnnnnnnnnnnnnnnnnnnnnnnnnnnnnnnnnnnnnnnnnnnnnnnnnnnnnnnnnnnnnnnnnnnnnnnnnnnnnnnnnnnnnnnnnnnnnnnnnnnnnnnnnnnnnnnnnnnnnnnnnnnnnnnnnnnnnnnnnnnnnnnnnnnnnnnnnnnnnnnnnnnnnnnnnnnnnnnnnnnnnnnnnnnnnnnnnnnnnnnnnnnnnnnnnnnnnnnnnnnnnnnnnnnnnnnnnnnnnnnnnnnnnnnnnnnnnnnnnnnnnnnnnnnnnnnnnnnnnnnnnnnnnnnnnnnnnnnnnnnnnnnnnnnnnnnnnnnnnnnnnnnnnnnnnnnnnnnnnnnnnnnnnnnnnnnnnnnnnnnnnnnnnnnnnnnnnnnnnnnnnnnnnnnnnnnnnnnnnnnnnnnnnnnnnnnnnnnnnnnnnnnnnnnnnnnnnnnnnnnnnnnnnnnnnnnnnnnnnnnnnnnnnnnnnnnnnnnnnnnnnnnnnnnnnnnnnnnnnnnnnnnnnnnnnnnnnnnnnnnnnnnnnnnnnnnnnnnnnnnnnnnnnnnnnnnnnnnnnnnnnnnnnnnnnnnnnnnnnnnnnnnnnnnnnnnnnnnnnnnnnnnnnnnnnnnnnnnnnnnnnnnnnnnnnnnnnnnnnnnnnnnnnnnnnnnnnnnnnnnnnnnnnnnnnnnnnnnnnnnnnnnnnnnnnnnnnnnnnnnnnnnnnnnnnnnnnnnnnnnnnnnnnnnnnnnnnnnnnnnnnnnnnnnnnnnnnnnnnnnnnnnnnnnnnnnnnnnnnnnnnnnnnnnnnnnnnnnnnnnnnnnnnnnnnnnnnnnnnnnnnnnnnnnnnnnnnnnnnnnnnnnnnnnnnnnnnnnnnnnnnnnnnnnnnnnnnnnnnnnnnnnnnnnnnnnnnnnnnnnnnnnnnnnnnnnnnnnnnnnnnnnnnnnnnnnnnnnnnnnnnnnnnnnnnnnnnnnnnnnnnnnnnnnnnnnnnnnnnnnnnnnnnnnnnnnnnnnnnnnnnnnnnnnnnnnnnnnnnnnnnnnnnnnnnnnnnnnnnnnnnnnnnnnnnnnnnnnnnnnnnnnnnnnnnnnnnnnnnnnnnnnnnnnnnnnnnnnnnnnnnnnnnnnnnnnnnnnnnnnnnnnnnnnnnnnnnnnnnnnnnnnnnnnnnnnnnnnnnnnnnnnnnnnnnnnnnnnnnnnnnnnnnnnnnnnnnnnnnnnnnnnnnnnnnnnnnnnnnnnnnnnnnnnnnnnnnnnnnnnnnnnnnnnnnnnnnnnnnnnnnnnnnnnnnnnnnnnnnnnnnnnnnnnnnnnnnnnnnnnnnnnnnnnnnnnnnnnnnnnnnnnnnnnnnnnnnnnnnnnnnnnnnnnnnnnnnnnnnnnnnnnnnnnnnnnnnnnnnnnnnnnnnnnnnnnnnnnnnnnnnnnnnnnnnnnnnnnnnnnnnnnnnnnnnnnnnnnnnnnnnnnnnnnnnnnnnnnnnnnnnnnnnnnnnnnnnnnnnnnnnnnnnnnnnnnnnnnnnnnnnnnnnnnnnnnnnnnnnnnnnnnnnnnnnnnnnnnnnnnnnnnnnnnnnnnnnnnnnnnnnnnnnnnnnnnnnnnnnnnnnnnnnnnnnnnnnnnnnnnnnnnnnnnnnnnnnnnnnnnnnnnnnnnnnnnnnnnnnnnnnnnnnnnnnnnnnnnnnnnnnnnnnnnnnnnnnnnnnnnnnnnnnnnnnnnnnnnnnnnnnnnnnnnnnnnnnnnnnnnnnnnnnnnnnnnnnnnnnnnnnnnnnnnnnnnnnnnnnnnnnnnnnnnnnnnnnnnnnnnnnnnnnnnnnnnnnnnnnnnnnnnnnnnnnnnnnnnnnnnnnnnnnnnnnnnnnnnnnnnnnnnnnnnnnnnnnnnnnnnnnnnnnnnnnnnnnnnnnnnnnnnnnnnnnnnnnnnnnnnnnnnnnnnnnnnnnnnnnnnnnnnnnnnnnnnnnnnnnnnnnnnnnnnnnnnnnnnnnnnnnnnnnnnnnnnnnnnnnnnnnnnnnnnnnnnnnnnnnnnnnnnnnnnnnnnnnnnnnnnnnnnnnnnnnnnnnnnnnnnnnnnnnnnnnnnnnnnnnnnnnnnnnnnnnnnnnnnnnnnnnnnnnnnnnnnnnnnnnnnnnnnnnnnnnnnnnnnnnnnnnnnnnnnnnnnnnnnnnnnnnnnnnnnnnnnnnnnnnnnnnnnnnnnnnnnnnnnnnnnnnnnnnnnnnnnnnnnnnnnnnnnnnnnnnnnnnnnnnnnnnnnnnnnnnnnnnnnnnnnnnnnnnnnnnnnnnnnnnnnnnnnnnnnnnnnnnnnnnnnnnnnnnnnnnnnnnnnnnnnnnnnnnnnnnnnnnnnnnnnnnnnnnnnnnnnnnnnnnnnnnnnnnnnnnnnnnnnnnnnnnnnnnnnnnnnnnnnnnnnnnnnnnnnnnnnnnnnnnnnnnnnnnnnnnnnnnnnnnnnnnnnnnnnnnnnnnnnnnnnnnnnnnnnnnnnnnnnnnnnnnnnnnnnnnnnnnnnnnnnnnnnnnnnnnnnnnnnnnnnnnnnnnnnnnnnnnnnnnnnnnnnnnnnnnnnnnnnnnnnnnnnnnnnnnnnnnnnnnnnnnnnnnnnnnnnnnnnnnnnnnnnnnnnnnnnnnnnnnnnnnnnnnnnnnnnnnnnnnnnnnnnnnnnnnnnnnnnnnnnnnnnnnnnnnnnnnnnnnnnnnnnnnnnnnnnnnnnnnnnnnnnnnnnnnnnnnnnnnnnnnnnnnnnnnnnnnnnnnnnnnnnnnnnnnnnnnnnnnnnnnnnnnnnnnnnnnnnnnnnnnnnnnnnnnnnnnnnnnnnnnnnnnnnnnnnnnnnnnnnnnnnnnnnnnnnnnnnnnnnnnnnnnnnnnnnnnnnnnnnnnnnnnnnnnnnnnnnnnnnnnnnnnnnnnnnnnnnnnnnnnnnnnnnnnnnnnnnnnnnnnnnnnnnnnnnnnnnnnnnnnnnnnnnnnnnnnnnnnnnnnnnnnnnnnnnnnnnnnnnnnnnnnnnnnnnnnnnnnnnnnnnnnnnnnnnnnnnnnnnnnnnnnnnnnnnnnnnnnnnnnnnnnnnnnnnnnnnnnnnnnnnnnnnnnnnnnnnnnnnnnnnnnnnnnnnnnnnnnnnnnnnnnnnnnnnnnnnnnnnnnnnnnnnnnnnnnnnnnnnnnnnnnnnnnnnnnnnnnnnnnnnnnnnnnnnnnnnnnnnnnnnnnnnnnnnnnnnnnnnnnnnnnnnnnnnnnnnnnnnnnnnnnnnnnnnnnnnnnnnnnnnnnnnnnnnnnnnnnnnnnnnnnnnnnnnnnnnnnnnnnnnnnnnnnnnnnnnnnnnnnnnnnnnnnnnnnnnnnnnnnnnnnnnnnnnnnnnnnnnnnnnnnnnnnnnnnnnnnnnnnnnnnnnnnnnnnnnnnnnnnnnnnnnnnnnnnnnnnnnnnnnnnnnnnnnnnnnnnnnnnnnnnnnnnnnnnnnnnnnnnnnnnnnnnnnnnnnnnnnnnnnnnnnnnnnnnnnnnnnnnnnnnnnnnnnnnnnnnnnnnnnnnnnnnnnnnnnnnnnnnnnnnnnnnnnnnnnnnnnnnnnnnnnnnnnnnnnnnnnnnnnnnnnnnnnnnnnnnnnnnnnnnnnnnnnnnnnnnnnnnnnnnnnnnnnnnnnnnnnnnnnnnnnnnnnnnnnnnnnnnnnnnnnnnnnnnnnnnnnnnnnnnnnnnnnnnnnnnnnnnnnnnnnnnnnnnnnnnnnnnnnnnnnnnnnnnnnnnnnnnnnnnnnnnnnnnnnnnnnnnnnnnnnnnnnnnnnnnnnnnnnnnnnnnnnnnnnnnnnnnnnnnnnnnnnnnnnnnnnnnnnnnnnnnnnnnnnnnnnnnnnnnnnnnnnnnnnnnnnnnnnnnnnnnnnnnnnnnnnnnnnnnnnnnnnnnnnnnnnnnnnnnnnnnnnnnnnnnnnnnnnnnnnnnnnnnnnnnnnnnnnnnnnnnnnnnnnnnnnnnnnnnnnnnnnnnnnnnnnnnnnnnnnnnnnnnnnnnnnnnnnnnnnnnnnnnnnnnnnnnnnnnnnnnnnnnnnnnnnnnnnnnnnnnnnnnnnnnnnnnnnnnnnnnnnnnnnnnnnnnnnnnnnnnnnnnnnnnnnnnnnnnnnnnnnnnnnnnnnnnnnnnnnnnnnnnnnnnnnnnnnnnnnnnnnnnnnnnnnnnnnnnnnnnnnnnnnnnnnnnnnnnnnnnnnnnnnnnnnnnnnnnnnnnnnnnnnnnnnnnnnnnnnnnnnnnnnnnnnnnnnnnnnnnnnnnnnnnnnnnnnnnnnnnnnnnnnnnnnnnnnnnnnnnnnnnnnnnnnnnnnnnnnnnnnnnnnnnnnnnnnnnnnnnnnnnnnnnnnnnnnnnnnnnnnnnnnnnnnnnnnnnnnnnnnnnnnnnnnnnnnnnnnnnnnnnnnnnnnnnnnnnnnnnnnnnnnnnnnnnnnnnnnnnnnnnnnnnnnnnnnnnnnnnnnnnnnnnnnnnnnnnnnnnnnnnnnnnnnnnnnnnnnnnnnnnnnnnnnnnnnnnnnnnnnnnnnnnnnnnnnnnnnnnnnnnnnnnnnnnnnnnnnnnnnnnnnnnnnnnnnnnnnnnnnnnnnnnnnnnnnnnnnnnnnnnnnnnnnnnnnnnnnnnnnnnnnnnnnnnnnnnnnnnnnnnnnnnnnnnnnnnnnnnnnnnnnnnnnnnnnnnnnnnnnnnnnnnnnnnnnnnnnnnnnnnnnnnnnnnnnnnnnnnnnnnnnnnnnnnnnnnnnnnnnnnnnnnnnnnnnnnnnnnnnnnnnnnnnnnnnnnnnnnnnnnnnnnnnnnnnnnnnnnnnnnnnnnnnnnnnnnnnnnnnnnnnnnnnnnnnnnnnnnnnnnnnnnnnnnnnnnnnnnnnnnnnnnnnnnnnnnnnnnnnnnnnnnnnnnnnnnnnnnnnnnnnnnnnnnnnnnnnnnnnnnnnnnnnnnnnnnnnnnnnnnnnnnnnnnnnnnnnnnnnnnnnnnnnnnnnnnnnnnnnnnnnnnnnnnnnnnnnnnnnnnnnnnnnnnnnnnnnnnnnnnnnnnnnnnnnnnnnnnnnnnnnnnnnnnnnnnnnnnnnnnnnnnnnnnnnnnnnnnnnnnnnnnnnnnnnnnnnnnnnnnnnnnnnnnnnnnnnnnnnnnnnnnnnnnnnnnnnnnnnnnnnnnnnnnnnnnnnnnnnnnnnnnnnnnnnnnnnnnnnnnnnnnnnnnnnnnnnnnnnnnnnnnnnnnnnnnnnnnnnnnnnnnnnnnnnnnnnnnnnnnnnnnnnnnnnnnnnnnnnnnnnnnnnnnnnnnnnnnnnnnnnnnnnnnnnnnnnnnnnnnnnnnnnnnnnnnnnnnnnnnnnnnnnnnnnnnnnnnnnnnnnnnnnnnnnnnnnnnnnnnnnnnnnnnnnnnnnnnnnnnnnnnnnnnnnnnnnnnnnnnnnnnnnnnnnnnnnnnnnnnnnnnnnnnnnnnnnnnnnnnnnnnnnnnnnnnnnnnnnnnnnnnnnnnnnnnnnnnnnnnnnnnnnnnnnnnnnnnnnnnnnnnnnnnnnnnnnnnnnnnnnnnnnnnnnnnnnnnnnnnnnnnnnnnnnnnnnnnnnnnnnnnnnnnnnnnnnnnnnnnnnnnnnnnnnnnnnnnnnnnnnnnnnnnnnnnnnnnnnnnnnnnnnnnnnnnnnnnnnnnnnnnnnnnnnnnnnnnnnnnnnnnnnnnnnnnnnnnnnnnnnnnnnnnnnnnnnnnnnnnnnnnnnnnnnnnnnnnnnnnnnnnnnnnnnnnnnnnnnnnnnnnnnnnnnnnnnnnnnnnnnnnnnnnnnnnnnnnnnnnnnnnnnnnnnnnnnnnnnnnnnnnnnnnnnnnnnnnnnnnnnnnnnnnnnnnnnnnnnnnnnnnnnnnnnnnnnnnnnnnnnnnnnnnnnnnnnnnnnnnnnnnnnnnnnnnnnnnnnnnnnnnnnnnnnnnnnnnnnnnnnnnnnnnnnnnnnnnnnnnnnnnnnnnnnnnnnnnnnnnnnnnnnnnnnnnnnnnnnnnnnnnnnnnnnnnnnnnnnnnnnnnnnnnnnnnnnnnnnnnnnnnnnnnnnnnnnnnnnnnnnnnnnnnnnnnnnnnnnnnnnnnnnnnnnnnnnnnnnnnnnnnnnnnnnnnnnnnnnnnnnnnnnnnnnnnnnnnnnnnnnnnnnnnnnnnnnnnnnnnnnnnnnnnnnnnnnnnnnnnnnnnnnnnnnnnnnnnnnnnnnnnnnnnnnnnnnnnnnnnnnnnnnnnnnnnnnnnnnnnnnnnnnnnnnnnnnnnnnnnnnnnnnnnnnnnnnnnnnnnnnnnnnnnnnnnnnnnnnnnnnnnnnnnnnnnnnnnnnnnnnnnnnnnnnnnnnnnnnnnnnnnnnnnnnnnnnnnnnnnnnnnnnnnnnnnnnnnnnnnnnnnnnnnnnnnnnnnnnnnnnnnnnnnnnnnnnnnnnnnnnnnnnnnnnnnnnnnnnnnnnnnnnnnnnnnnnnnnnnnnnnnnnnnnnnnnnnnnnnnnnnnnnnnnnnnnnnnnnnnnnnnnnnnnnnnnnnnnnnnnnnnnnnnnnnnnnnnnnnnnnnnnnnnnnnnnnnnnnnnnnnnnnnnnnnnnnnnnnnnnnnnnnnnnnnnnnnnnnnnnnnnnnnnnnnnnnnnnnnnnnnnnnnnnnnnnnnnnnnnnnnnnnnnnnnnnnnnnnnnnnnnnnnnnnnnnnnnnnnnnnnnnnnnnnnnnnnnnnnnnnnnnnnnnnnnnnnnnnnnnnnnnnnnnnnnnnnnnnnnnnnnnnnnnnnnnnnnnnnnnnnnnnnnnnnnnnnnnnnnnnnnnnnnnnnnnnnnnnnnnnnnnnnnnnnnnnnnnnnnnnnnnnnnnnnnnnnnnnnnnnnnnnnnnnnnnnnnnnnnnnnnnnnnnnnnnnnnnnnnnnnnnnnnnnnnnnnnnnnnnnnnnnnnnnnnnnnnnnnnnnnnnnnnnnnnnnnnnnnnnnnnnnnnnnnnnnnnnnnnnnnnnnnnnnnnnnnnnnnnnnnnnnnnnnnnnnnnnnnnnnnnnnnnnnnnnnnnnnnnnnnnnnnnnnnnnnnnnnnnnnnnnnnnnnnnnnnnnnnnnnnnnnnnnnnnnnnnnnnnnnnnnnnnnnnnnnnnnnnnnnnnnnnnnnnnnnnnnnnnnnnnnnnnnnnnnnnnnnnnnnnnnnnnnnnnnnnnnnnnnnnnnnnnnnnnnnnnnnnnnnnnnnnnnnnnnnnnnnnnnnnnnnnnnnnnnnnnnnnnnnnnnnnnnnnnnnnnnnnnnnnnnnnnnnnnnnnnnnnnnnnnnnnnnnnnnnnnnnnnnnnnnnnnnnnnnnnnnnnnnnnnnnnnnnnnnnnnnnnnnnnnnnnnnnnnnnnnnnnnnnnnnnnnnnnnnnnnnnnnnnnnnnnnnnnnnnnnnnnnnnnnnnnnnnnnnnnnnnnnnnnnnnnnnnnnnnnnnnnnnnnnnnnnnnnnnnnnnnnnnnnnnnnnnnnnnnnnnnnnnnnnnnnnnnnnnnnnnnnnnnnnnnnnnnnnnnnnnnnnnnnnnnnnnnnnnnnnnnnnnnnnnnnnnnnnnnnnnnnnnnnnnnnnnnnnnnnnnnnnnnnnnnnnnnnnnnnnnnnnnnnnnnnnnnnnnnnnnnnnnnnnnnnnnnnnnnnnnnnnnnnnnnnnnnnnnnnnnnnnnnnnnnnnnnnnnnnnnnnnnnnnnnnnnnnnnnnnnnnnnnnnnnnnnnnnnnnnnnnnnnnnnnnnnnnnnnnnnnnnnnnnnnnnnnnnnnnnnnnnnnnnnnnnnnnnnnnnnnnnnnnnnnnnnnnnnnnnnnnnnnnnnnnnnnnnnnnnnnnnnnnnnnnnnnnnnnnnnnnnnnnnnnnnnnnnnnnnnnnnnnnnnnnnnnnnnnnnnnnnnnnnnnnnnnnnnnnnnnnnnnnnnnnnnnnnnnnnnnnnnnnnnnnnnnnnnnnnnnnnnnnnnnnnnnnnnnnnnnnnnnnnnnnnnnnnnnnnnnnnnnnnnnnnnnnnnnnnnnnnnnnnnnnnnnnnnnnnnnnnnnnnnnnnnnnnnnnnnnnnnnnnnnnnnnnnnnnnnnnnnnnnnnnnnnnnnnnnnnnnnnnnnnnnnnnnnnnnnnnnnnnnnnnnnnnnnnnnnnnnnnnnnnnnnnnnnnnnnnnnnnnnnnnnnnnnnnnnnnnnnnnnnnnnnnnnnnnnnnnnnnnnnnnnnnnnnnnnnnnnnnnnnnnnnnnnnnnnnnnnnnnnnnnnnnnnnnnnnnnnnnnnnnnnnnnnnnnnnnnnnnnnnnnnnnnnnnnnnnnnnnnnnnnnnnnnnnnnnnnnnnnnnnnnnnnnnnnnnnnnnnnnnnnnnnnnnnnnnnnnnnnnnnnnnnnnnnnnnnnnnnnnnnnnnnnnnnnnnnnnnnnnnnnnnnnnnnnnnnnnnnnnnnnnnnnnnnnnnnnnnnnnnnnnnnnnnnnnnnnnnnnnnnnnnnnnnnnnnnnnnnnnnnnnnnnnnnnnnnnnnnnnnnnnnnnnnnnnnnnnnnnnnnnnnnnnnnnnnnnnnnnnnnnnnnnnnnnnnnnnnnnnnnnnnnnnnnnnnnnnnnnnnnnnnnnnnnnnnnnnnnnnnnnnnnnnnnnnnnnnnnnnnnnnnnnnnnnnnnnnnnnnnnnnnnnnnnnnnnnnnnnnnnnnnnnnnnnnnnnnnnnnnnnnnnnnnnnnnnnnnnnnnnnnnnnnnnnnnnnnnnnnnnnnnnnnnnnnnnnnnnnnnnnnnnnnnnnnnnnnnnnnnnnnnnnnnnnnnnnnnnnnnnnnnnnnnnnnnnnnnnnnnnnnnnnnnnnnnnnnnnnnnnnnnnnnnnnnnnnnnnnnnnnnnnnnnnnnnnnnnnnnnnnnnnnnnnnnnnnnnnnnnnnnnnnnnnnnnnnnnnnnnnnnnnnnnnnnnnnnnnnnnnnnnnnnnnnnnnnnnnnnnnnnnnnnnnnnnnnnnnnnnnnnnnnnnnnnnnnnnnnnnnnnnnnnnnnnnnnnnnnnnnnnnnnnnnnnnnnnnnnnnnnnnnnnnnnnnnnnnnnnnnnnnnnnnnnnnnnnnnnnnnnnnnnnnnnnnnnnnnnnnnnnnnnnnnnnnnnnnnnnnnnnnnnnnnnnnnnnnnnnnnnnnnnnnnnnnnnnnnnnnnnnnnnnnnnnnnnnnnnnnnnnnnnnnnnnnnnnnnnnnnnnnnnnnnnnnnnnnnnnnnnnnnnnnnnnnnnnnnnnnnnnnnnnnnnnnnnnnnnnnnnnnnnnnnnnnnnnnnnnnnnnnnnnnnnnnnnnnnnnnnnnnnnnnnnnnnnnnnnnnnnnnnnnnnnnnnnnnnnnnnnnnnnnnnnnnnnnnnnnnnnnnnnnnnnnnnnnnnnnnnnnnnnnnnnnnnnnnnnnnnnnnnnnnnnnnnnnnnnnnnnnnnnnnnnnnnnnnnnnnnnnnnnnnnnnnnnnnnnnnnnnnnnnnnnnnnnnnnnnnnnnnnnnnnnnnnnnnnnnnnnnnnnnnnnnnnnnnnnnnnnnnnnnnnnnnnnnnnnnnnnnnnnnnnnnnnnnnnnnnnnnnnnnnnnnnnnnnnnnnnnnnnnnnnnnnnnnnnnnnnnnnnnnnnnnnnnnnnnnnnnnnnnnnnnnnnnnnnnnnnnnnnnnnnnnnnnnnnnnnnnnnnnnnnnnnnnnnnnnnnnnnnnnnnnnnnnnnnnnnnnnnnnnnnnnnnnnnnnnnnnnnnnnnnnnnnnnnnnnnnnnnnnnnnnnnnnnnnnnnnnnnnnnnnnnnnnnnnnnnnnnnnnnnnnnnnnnnnnnnnnnnnnnnnnnnnnnnnnnnnnnnnnnnnnnnnnnnnnnnnnnnnnnnnnnnnnnnnnnnnnnnnnnnnnnnnnnnnnnnnnnnnnnnnnnnnnnnnnnnnnnnnnnnnnnnnnnnnnnnnnnnnnnnnnnnnnnnnnnnnnnnnnnnnnnnnnnnnnnnnnnnnnnnnnnnnnnnnnnnnnnnnnnnnnnnnnnnnnnnnnnnnnnnnnnnnnnnnnnnnnnnnnnnnnnnnnnnnnnnnnnnnnnnnnnnnnnnnnnnnnnnnnnnnnnnnnnnnnnnnnnnnnnnnnnnnnnnnnnnnnnnnnnnnnnnnnnnnnnnnnnnnnnnnnnnnnnnnnnnnnnnnnnnnnnnnnnnnnnnnnnnnnnnnnnnnnnnnnnnnnnnnnnnnnnnnnnnnnnnnnnnnnnnnnnnnnnnnnnnnnnnnnnnnnnnnnnnnnnnnnnnnnnnnnnnnnnnnnnnnnnnnnnnnnnnnnnnnnnnnnnnnnnnnnnnnnnnnnnnnnnnnnnnnnnnnnnnnnnnnnnnnnnnnnnnnnnnnnnnnnnnnnnnnnnnnnnnnnnnnnnnnnnnnnnnnnnnnnnnnnnnnnnnnnnnnnnnnnnnnnnnnnnnnnnnnnnnnnnnnnnnnnnnnnnnnnnnnnnnnnnnnnnnnnnnnnnnnnnnnnnnnnnnnnnnnnnnnnnnnnnnnnnnnnnnnnnnnnnnnnnnnnnnnnnnnnnnnnnnnnnnnnnnnnnnnnnnnnnnnnnnnnnnnnnnnnnnnnnnnnnnnnnnnnnnnnnnnnnnnnnnnnnnnnnnnnnnnnnnnnnnnnnnnnnnnnnnnnnnnnnnnnnnnnnnnnnnnnnnnnnnnnnnnnnnnnnnnnnnnnnnnnnnnnnnnnnnnnnnnnnnnnnnnnnnnnnnnnnnnnnnnnnnnnnnnnnnnnnnnnnnnnnnnnnnnnnnnnnnnnnnnnnnnnnnnnnnnnnnnnnnnnnnnnnnnnnnnnnnnnnnnnnnnnnnnnnnnnnnnnnnnnnnnnnnnnnnnnnnnnnnnnnnnnnnnnnnnnnnnnnnnnnnnnnnnnnnnnnnnnnnnnnnnnnnnnnnnnnnnnnnnnnnnnnnnnnnnnnnnnnnnnnnnnnnnnnnnnnnnnnnnnnnnnnnnnnnnnnnnnnnnnnnnnnnnnnnnnnnnnnnnnnnnnnnnnnnnnnnnnnnnnnnnnnnnnnnnnnnnnnnnnnnnnnnnnnnnnnnnnnnnnnnnnnnnnnnnnnnnnnnnnnnnnnnnnnnnnnnnnnnnnnnnnnnnnnnnnnnnnnnnnnnnnnnnnnnnnnnnnnnnnnnnnnnnnnnnnnnnnnnnnnnnnnnnnnnnnnnnnnnnnnnnnnnnnnnnnnnnnnnnnnnnnnnnnnnnnnnnnnnnnnnnnnnnnnnnnnnnnnnnnnnnnnnnnnnnnnnnnnnnnnnnnnnnnnnnnnnnnnnnnnnnnnnnnnnnnnnnnnnnnnnnnnnnnnnnnnnnnnnnnnnnnnnnnnnnnnnnnnnnnnnnnnnnnnnnnnnnnnnnnnnnnnnnnnnnnnnnnnnnnnnnnnnnnnnnnnnnnnnnnnnnnnnnnnnnnnnnnnnnnnnnnnnnnnnnnnnnnnnnnnnnnnnnnnnnnnnnnnnnnnnnnnnnnnnnnnnnnnnnnnnnnnnnnnnnnnnnnnnnnnnnnnnnnnnnnnnnnnnnnnnnnnnnnnnnnnnnnnnnnnnnnnnnnnnnnnnnnnnnnnnnnnnnnnnnnnnnnnnnnnnnnnnnnnnnnnnnnnnnnnnnnnnnnnnnnnnnnnnnnnnnnnnnnnnnnnnnnnnnnnnnnnnnnnnnnnnnnnnnnnnnnnnnnnnnnnnnnnnnnnnnnnnnnnnnnnnnnnnnnnnnnnnnnnnnnnnnnnnnnnnnnnnnnnnnnnnnnnnnnnnnnnnnnnnnnnnnnnnnnnnnnnnnnnnnnnnnnnnnnnnnnnnnnnnnnnnnnnnnnnnnnnnnnnnnnnnnnnnnnnnnnnnnnnnnnnnnnnnnnnnnnnnnnnnnnnnnnnnnnnnnnnnnnnnnnnnnnnnnnnnnnnnnnnnnnnnnnnnnnnnnnnnnnnnnnnnnnnnnnnnnnnnnnnnnnnnnnnnnnnnnnnnnnnnnnnnnnnnnnnnnnnnnnnnnnnnnnnnnnnnnnnnnnnnnnnnnnnnnnnnnnnnnnnnnnnnnnnnnnnnnnnnnnnnnnnnnnnnnnnnnnnnnnnnnnnnnnnnnnnnnnnnnnnnnnnnnnnnnnnnnnnnnnnnnnnnnnnnnnnnnnnnnnnnnnnnnnnnnnnnnnnnnnnnnnnnnnnnnnnnnnnnnnnnnnnnnnnnnnnnnnnnnnnnnnnnnnnnnnnnnnnnnnnnnnnnnnnnnnnnnnnnnnnnnnnnnnnnnnnnnnnnnnnnnnnnnnnnnnnnnnnnnnnnnnnnnnnnnnnnnnnnnnnnnnnnnnnnnnnnnnnnnnnnnnnnnnnnnnnnnnnnnnnnnnnnnnnnnnnnnnnnnnnnnnnnnnnnnnnnnnnnnnnnnnnnnnnnnnnnnnnnnnnnnnnnnnnnnnnnnnnnnnnnnnnnnnnnnnnnnnnnnnnnnnnnnnnnnnnnnnnnnnnnnnnnnnnnnnnnnnnnnnnnnnnnnnnnnnnnnnnnnnnnnnnnnnnnnnnnnnnnnnnnnnnnnnnnnnnnnnnnnnnnnnnnnnnnnnnnnnnnnnnnnnnnnnnnnnnnnnnnnnnnnnnnnnnnnnnnnnnnnnnnnnnnnnnnnnnnnnnnnnnnnnnnnnnnnnnnnnnnnnnnnnnnnnnnnnnnnnnnnnnnnnnnnnnnnnnnnnnnnnnnnnnnnnnnnnnnnnnnnnnnnnnnnnnnnnnnnnnnnnnnnnnnnnnnnnnnnnnnnnnnnnnnnnnnnnnnnnnnnnnnnnnnnnnnnnnnnnnnnnnnnnnnnnnnnnnnnnnnnnnnnnnnnnnnnnnnnnnnnnnnnnnnnnnnnnnnnnnnnnnnnnnnnnnnnnnnnnnnnnnnnnnnnnnnnnnnnnnnnnnnnnnnnnnnnnnnnnnnnnnnnnnnnnnnnnnnnnnnnnnnnnnnnnnnnnnnnnnnnnnnnnnnnnnnnnnnnnnnnnnnnnnnnnnnnnnnnnnnnnnnnnnnnnnnnnnnnnnnnnnnnnnnnnnnnnnnnnnnnnnnnnnnnnnnnnnnnnnnnnnnnnnnnnnnnnnnnnnnnnnnnnnnnnnnnnnnnnnnnnnnnnnnnnnnnnnnnnnnnnnnnnnnnnnnnnnnnnnnnnnnnnnnnnnnnnnnnnnnnnnnnnnnnnnnnnnnnnnnnnnnnnnnnnnnnnnnnnnnnnnnnnnnnnnnnnnnnnnnnnnnnnnnnnnnnnnnnnnnnnnnnnnnnnnnnnnnnnnnnnnnnnnnnnnnnnnnnnnnnnnnnnnnnnnnnnnnnnnnnnnnnnnnnnnnnnnnnnnnnnnnnnnnnnnnnnnnnnnnnnnnnnnnnnnnnnnnnnnnnnnnnnnnnnnnnnnnnnnnnnnnnnnnnnnnnnnnnnnnnnnnnnnnnnnnnnnnnnnnnnnnnnnnnnnnnnnnnnnnnnnnnnnnnnnnnnnnnnnnnnnnnnnnnnnnnnnnnnnnnnnnnnnnnnnnnnnnnnnnnnnnnnnnnnnnnnnnnnnnnnnnnnnnnnnnnnnnnnnnnnnnnnnnnnnnnnnnnnnnnnnnnnnnnnnnnnnnnnnnnnnnnnnnnnnnnnnnnnnnnnnnnnnnnnnnnnnnnnnnnnnnnnnnnnnnnnnnnnnnnnnnnnnnnnnnnnnnnnnnnnnnnnnnnnnnnnnnnnnnnnnnnnnnnnnnnnnnnnnnnnnnnnnnnnnnnnnnnnnnnnnnnnnnnnnnnnnnnnnnnnnnnnnnnnnnnnnnnnnnnnnnnnnnnnnnnnnnnnnnnnnnnnnnnnnnnnnnnnnnnnnnnnnnnnnnnnnnnnnnnnnnnnnnnnnnnnnnnnnnnnnnnnnnnnnnnnnnnnnnnnnnnnnnnnnnnnnnnnnnnnnnnnnnnnnnnnnnnnnnnnnnnnnnnnnnnnnnnnnnnnnnnnnnnnnnnnnnnnnnnnnnnnnnnnnnnnnnnnnnnnnnnnnnnnnnnnnnnnnnnnnnnnnnnnnnnnnnnnnnnnnnnnnnnnnnnnnnnnnnnnnnnnnnnnnnnnnnnnnnnnnnnnnnnnnnnnnnnnnnnnnnnnnnnnnnnnnnnnnnnnnnnnnnnnnnnnnnnnnnnnnnnnnnnnnnnnnnnnnnnnnnnnnnnnnnnnnnnnnnnnnnnnnnnnnnnnnnnnnnnnnnnnnnnnnnnnnnnnnnnnnnnnnnnnnnnnnnnnnnnnnnnnnnnnnnnnnnnnnnnnnnnnnnnnnnnnnnnnnnnnnnnnnnnnnnnnnnnnnnnnnnnnnnnnnnnnnnnnnnnnnnnnnnnnnnnnnnnnnnnnnnnnnnnnnnnnnnnnnnnnnnnnnnnnnnnnnnnnnnnnnnnnnnnnnnnnnnnnnnnnnnnnnnnnnnnnnnnnnnnnnnnnnnnnnnnnnnnnnnnnnnnnnnnnnnnnnnnnnnnnnnnnnnnnnnnnnnnnnnnnnnnnnnnnnnnnnnnnnnnnnnnnnnnnnnnnnnnnnnnnnnnnnnnnnnnnnnnnnnnnnnnnnnnnnnnnnnnnnnnnnnnnnnnnnnnnnnnnnnnnnnnnnnnnnnnnnnnnnnnnnnnnnnnnnnnnnnnnnnnnnnnnnnnnnnnnnnnnnnnnnnnnnnnnnnnnnnnnnnnnnnnnnnnnnnnnnnnnnnnnnnnnnnnnnnnnnnnnnnnnnnnnnnnnnnnnnnnnnnnnnnnnnnnnnnnnnnnnnnnnnnnnnnnnnnnnnnnnnnnnnnnnnnnnnnnnnnnnnnnnnnnnnnnnnnnnnnnnnnnnnnnnnnnnnnnnnnnnnnnnnnnnnnnnnnnnnnnnnnnnnnnnnnnnnnnnnnnnnnnnnnnnnnnnnnnnnnnnnnnnnnnnnnnnnnnnnnnnnnnnnnnnnnnnnnnnnnnnnnnnnnnnnnnnnnnnnnnnnnnnnnnnnnnnnnnnnnnnnnnnnnnnnnnnnnnnnnnnnnnnnnnnnnnnnnnnnnnnnnnnnnnnnnnnnnnnnnnnnnnnnnnnnnnnnnnnnnnnnnnnnnnnnnnnnnnnnnnnnnnnnnnnnnnnnnnnnnnnnnnnnnnnnnnnnnnnnnnnnnnnnnnnnnnnnnnnnnnnnnnnnnnnnnnnnnnnnnnnnnnnnnnnnnnnnnnnnnnnnnnnnnnnnnnnnnnnnnnnnnnnnnnnnnnnnnnnnnnnnnnnnnnnnnnnnnnnnnnnnnnnnnnnnnnnnnnnnnnnnnnnnnnnnnnnnnnnnnnnnnnnnnnnnnnnnnnnnnnnnnnnnnnnnnnnnnnnnnnnnnnnnnnnnnnnnnnnnnnnnnnnnnnnnnnnnnnnnnnnnnnnnnnnnnnnnnnnnnnnnnnnnnnnnnnnnnnnnnnnnnnnnnnnnnnnnnnnnnnnnnnnnnnnnnnnnnnnnnnnnnnnnnnnnnnnnnnnnnnnnnnnnnnnnnnnnnnnnnnnnnnnnnnnnnnnnnnnnnnnnnnnnnnnnnnnnnnnnnnnnnnnnnnnnnnnnnnnnnnnnnnnnnnnnnnnnnnnnnnnnnnnnnnnnnnnnnnnnnnnnnnnnnnnnnnnnnnnnnnnnnnnnnnnnnnnnnnnnnnnnnnnnnnnnnnnnnnnnnnnnnnnnnnnnnnnnnnnnnnnnnnnnnnnnnnnnnnnnnnnnnnnnnnnnnnnnnnnnnnnnnnnnnnnnnnnnnnnnnnnnnnnnnnnnnnnnnnnnnnnnnnnnnnnnnnnnnnnnnnnnnnnnnnnnnnnnnnnnnnnnnnnnnnnnnnnnnnnnnnnnnnnnnnnnnnnnnnnnnnnnnnnnnnnnnnnnnnnnnnnnnnnnnnnnnnnnnnnnnnnnnnnnnnnnnnnnnnnnnnnnnnnnnnnnnnnnnnnnnnnnnnnnnnnnnnnnnnnnnnnnnnnnnnnnnnnnnnnnnnnnnnnnnnnnnnnnnnnnnnnnnnnnnnnnnnnnnnnnnnnnnnnnnnnnnnnnnnnnnnnnnnnnnnnnnnnnnnnnnnnnnnnnnnnnnnnnnnnnnnnnnnnnnnnnnnnnnnnnnnnnnnnnnnnnnnnnnnnnnnnnnnnnnnnnnnnnnnnnnnnnnnnnnnnnnnnnnnnnnnnnnnnnnnnnnnnnnnnnnnnnnnnnnnnnnnnnnnnnnnnnnnnnnnnnnnnnnnnnnnnnnnnnnnnnnnnnnnnnnnnnnnnnnnnnnnnnnnnnnnnnnnnnnnnnnnnnnnnnnnnnnnnnnnnnnnnnnnnnnnnnnnnnnnnnnnnnnnnnnnnnnnnnnnnnnnnnnnnnnnnnnnnnnnnnnnnnnnnnnnnnnnnnnnnnnnnnnnnnnnnnnnnnnnnnnnnnnnnnnnnnnnnnnnnnnnnnnnnnnnnnnnnnnnnnnnnnnnnnnnnnnnnnnnnnnnnnnnnnnnnnnnnnnnnnnnnnnnnnnnnnnnnnnnnnnnnnnnnnnnnnnnnnnnnnnnnnnnnnnnnnnnnnnnnnnnnnnnnnnnnnnnnnnnnnnnnnnnnnnnnnnnnnnnnnnnnnnnnnnnnnnnnnnnnnnnnnnnnnnnnnnnnnnnnnnnnnnnnnnnnnnnnnnnnnnnnnnnnnnnnnnnnnnnnnnnnnnnnnnnnnnnnnnnnnnnnnnnnnnnnnnnnnnnnnnnnnnnnnnnnnnnnnnnnnnnnnnnnnnnnnnnnnnnnnnnnnnnnnnnnnnnnnnnnnnnnnnnnnnnnnnnnnnnnnnnnnnnnnnnnnnnnnnnnnnnnnnnnnnnnnnnnnnnnnnnnnnnnnnnnnnnnnnnnnnnnnnnnnnnnnnnnnnnnnnnnnnnnnnnnnnnnnnnnnnnnnnnnnnnnnnnnnnnnnnnnnnnnnnnnnnnnnnnnnnnnnnnnnnnnnnnnnnnnnnnnnnnnnnnnnnnnnnnnnnnnnnnnnnnnnnnnnnnnnnnnnnnnnnnnnnnnnnnnnnnnnnnnnnnnnnnnnnnnnnnnnnnnnnnnnnnnnnnnnnnnnnnnnnnnnnnnnnnnnnnnnnnnnnnnnnnnnnnnnnnnnnnnnnnnnnnnnnnnnnnnnnnnnnnnnnnnnnnnnnnnnnnnnnnnnnnnnnnnnnnnnnnnnnnnnnnnnnnnnnnnnnnnnnnnnnnnnnnnnnnnnnnnnnnnnnnnnnnnnnnnnnnnnnnnnnnnnnnnnnnnnnnnnnnnnnnnnnnnnnnnnnnnnnnnnnnnnnnnnnnnnnnnnnnnnnnnnnnnnnnnnnnnnnnnnnnnnnnnnnnnnnnnnnnnnnnnnnnnnnnnnnnnnnnnnnnnnnnnnnnnnnnnnnnnnnnnnnnnnnnnnnnnnnnnnnnnnnnnnnnnnnnnnnnnnnnnnnnnnnnnnnnnnnnnnnnnnnnnnnnnnnnnnnnnnnnnnnnnnnnnnnnnnnnnnnnnnnnnnnnnnnnnnnnnnnnnnnnnnnnnnnnnnnnnnnnnnnnnnnnnnnnnnnnnnnnnnnnnnnnnnnnnnnnnnnnnnnnnnnnnnnnnnnnnnnnnnnnnnnnnnnnnnnnnnnnnnnnnnnnnnnnnnnnnnnnnnnnnnnnnnnnnnnnnnnnnnnnnnnnnnnnnnnnnnnnnnnnnnnnnnnnnnnnnnnnnnnnnnnnnnnnnnnnnnnnnnnnnnnnnnnnnnnnnnnnnnnnnnnnnnnnnnnnnnnnnnnnnnnnnnnnnnnnnnnnnnnnnnnnnnnnnnnnnnnnnnnnnnnnnnnnnnnnnnnnnnnnnnnnnnnnnnnnnnnnnnnnnnnnnnnnnnnnnnnnnnnnnnnnnnnnnnnnnnnnnnnnnnnnnnnnnnnnnnnnnnnnnnnnnnnnnnnnnnnnnnnnnnnnnnnnnnnnnnnnnnnnnnnnnnnnnnnnnnnnnnnnnnnnnnnnnnnnnnnnnnnnnnnnnnnnnnnnnnnnnnnnnnnnnnnnnnnnnnnnnnnnnnnnnnnnnnnnnnnnnnnnnnnnnnnnnnnnnnnnnnnnnnnnnnnnnnnnnnnnnnnnnnnnnnnnnnnnnnnnnnnnnnnnnnnnnnnnnnnnnnnnnnnnnnnnnnnnnnnnnnnnnnnnnnnnnnnnnnnnnnnnnnnnnnnnnnnnnnnnnnnnnnnnnnnnnnnnnnnnnnnnnnnnnnnnnnnnnnnnnnnnnnnnnnnnnnnnnnnnnnnnnnnnnnnnnnnnnnnnnnnnnnnnnnnnnnnnnnnnnnnnnnnnnnnnnnnnnnnnnnnnnnnnnnnnnnnnnnnnnnnnnnnnnnnnnnnnnnnnnnnnnnnnnnnnnnnnnnnnnnnnnnnnnnnnnnnnnnnnnnnnnnnnnnnnnnnnnnnnnnnnnnnnnnnnnnnnnnnnnnnnnnnnnnnnnnnnnnnnnnnnnnnnnnnnnnnnnnnnnnnnnnnnnnnnnnnnnnnnnnnnnnnnnnnnnnnnnnnnnnnnnnnnnnnnnnnnnnnnnnnnnnnnnnnnnnnnnnnnnnnnnnnnnnnnnnnnnnnnnnnnnnnnnnnnnnnnnnnnnnnnnnnnnnnnnnnnnnnnnnnnnnnnnnnnnnnnnnnnnnnnnnnnnnnnnnnnnnnnnnnnnnnnnnnnnnnnnnnnnnnnnnnnnnnnnnnnnnnnnnnnnnnnnnnnnnnnnnnnnnnnnnnnnnnnnnnnnnnnnnnnnnnnnnnnnnnnnnnnnnnnnnnnnnnnnnnnnnnnnnnnnnnnnnnnnnnnnnnnnnnnnnnnnnnnnnnnnnnnnnnnnnnnnnnnnnnnnnnnnnnnnnnnnnnnnnnnnnnnnnnnnnnnnnnnnnnnnnnnnnnnnnnnnnnnnnnnnnnnnnnnnnnnnnnnnnnnnnnnnnnnnnnnnnnnnnnnnnnnnnnnnnnnnnnnnnnnnnnnnnnnnnnnnnnnnnnnnnnnnnnnnnnnnnnnnnnnnnnnnnnnnnnnnnnnnnnnnnnnnnnnnnnnnnnnnnnnnnnnnnnnnnnnnnnnnnnnnnnnnnnnnnnnnnnnnnnnnnnnnnnnnnnnnnnnnnnnnnnnnnnnnnnnnnnnnnnnnnnnnnnnnnnnnnnnnnnnnnnnnnnnnnnnnnnnnnnnnnnnnnnnnnnnnnnnnnnnnnnnnnnnnnnnnnnnnnnnnnnnnnnnnnnnnnnnnnnnnnnnnnnnnnnnnnnnnnnnnnnnnnnnnnnnnnnnnnnnnnnnnnnnnnnnnnnnnnnnnnnnnnnnnnnnnnnnnnnnnnnnnnnnnnnnnnnnnnnnnnnnnnnnnnnnnnnnnnnnnnnnnnnnnnnnnnnnnnnnnnnnnnnnnnnnnnnnnnnnnnnnnnnnnnnnnnnnnnnnnnnnnnnnnnnnnnnnnnnnnnnnnnnnnnnnnnnnnnnnnnnnnnnnnnnnnnnnnnnnnnnnnnnnnnnnnnnnnnnnnnnnnnnnnnnnnnnnnnnnnnnnnnnnnnnnnnnnnnnnnnnnnnnnnnnnnnnnnnnnnnnnnnnnnnnnnnnnnnnnnnnnnnnnnnnnnnnnnnnnnnnnnnnnnnnnnnnnnnnnnnnnnnnnnnnnnnnnnnnnnnnnnnnnnnnnnnnnnnnnnnnnnnnnnnnnnnnnnnnnnnnnnnnnnnnnnnnnnnnnnnnnnnnnnnnnnnnnnnnnnnnnnnnnnnnnnnnnnnnnnnnnnnnnnnnnnnnnnnnnnnnnnnnnnnnnnnnnnnnnnnnnnnnnnnnnnnnnnnnnnnnnnnnnnnnnnnnnnnnnnnnnnnnnnnnnnnnnnnnnnnnnnnnnnnnnnnnnnnnnnnnnnnnnnnnnnnnnnnnnnnnnnnnnnnnnnnnnnnnnnnnnnnnnnnnnnnnnnnnnnnnnnnnnnnnnnnnnnnnnnnnnnnnnnnnnnnnnnnnnnnnnnnnnnnnnnnnnnnnnnnnnnnnnnnnnnnnnnnnnnnnnnnnnnnnnnnnnnnnnnnnnnnnnnnnnnnnnnnnnnnnnnnnnnnnnnnnnnnnnnnnnnnnnnnnnnnnnnnnnnnnnnnnnnnnnnnnnnnnnnnnnnnnnnnnnnnnnnnnnnnnnnnnnnnnnnnnnnnnnnnnnnnnnnnnnnnnnnnnnnnnnnnnnnnnnnnnnnnnnnnnnnnnnnnnnnnnnnnnnnnnnnnnnnnnnnnnnnnnnnnnnnnnnnnnnnnnnnnnnnnnnnnnnnnnnnnnnnnnnnnnnnnnnnnnnnnnnnnnnnnnnnnnnnnnnnnnnnnnnnnnnnnnnnnnnnnnnnnnnnnnnnnnnnnnnnnnnnnnnnnnnnnnnnnnnnnnnnnnnnnnnnnnnnnnnnnnnnnnnnnnnnnnnnnnnnnnnnnnnnnnnnnnnnnnnnnnnnnnnnnnnnnnnnnnnnnnnnnnnnnnnnnnnnnnnnnnnnnnnnnnnnnnnnnnnnnnnnnnnnnnnnnnnnnnnnnnnnnnnnnnnnnnnnnnnnnnnnnnnnnnnnnnnnnnnnnnnnnnnnnnnnnnnnnnnnnnnnnnnnnnnnnnnnnnnnnnnnnnnnnnnnnnnnnnnnnnnnnnnnnnnnnnnnnnnnnnnnnnnnnnnnnnnnnnnnnnnnnnnnnnnnnnnnnnnnnnnnnnnnnnnnnnnnnnnnnnnnnnnnnnnnnnnnnnnnnnnnnnnnnnnnnnnnnnnnnnnnnnnnnnnnnnnnnnnnnnnnnnnnnnnnnnnnnnnnnnnnnnnnnnnnnnnnnnnnnnnnnnnnnnnnnnnnnnnnnnnnnnnnnnnnnnnnnnnnnnnnnnnnnnnnnnnnnnnnnnnnnnnnnnnnnnnnnnnnnnnnnnnnnnnnnnnnnnnnnnnnnnnnnnnnnnnnnnnnnnnnnnnnnnnnnnnnnnnnnnnnnnnnnnnnnnnnnnnnnnnnnnnnnnnnnnnnnnnnnnnnnnnnnnnnnnnnnnnnnnnnnnnnnnnnnnnnnnnnnnnnnnnnnnnnnnnnnnnnnnnnnnnnnnnnnnnnnnnnnnnnnnnnnnnnnnnnnnnnnnnnnnnnnnnnnnnnnnnnnnnnnnnnnnnnnnnnnnnnnnnnnnnnnnnnnnnnnnnnnnnnnnnnnnnnnnnnnnnnnnnnnnnnnnnnnnnnnnnnnnnnnnnnnnnnnnnnnnnnnnnnnnnnnnnnnnnnnnnnnnnnnnnnnnnnnnnnnnnnnnnnnnnnnnnnnnnnnnnnnnnnnnnnnnnnnnnnnnnnnnnnnnnnnnnnnnnnnnnnnnnnnnnnnnnnnnnnnnnnnnnnnnnnnnnnnnnnnnnnnnnnnnnnnnnnnnnnnnnnnnnnnnnnnnnnnnnnnnnnnnnnnnnnnnnnnnnnnnnnnnnnnnnnnnnnnnnnnnnnnnnnnnnnnnnnnnnnnnnnnnnnnnnnnnnnnnnnnnnnnnnnnnnnnnnnnnnnnnnnnnnnnnnnnnnnnnnnnnnnnnnnnnnnnnnnnnnnnnnnnnnnnnnnnnnnnnnnnnnnnnnnnnnnnnnnnnnnnnnnnnnnnnnnnnnnnnnnnnnnnnnnnnnnnnnnnnnnnnnnnnnnnnnnnnnnnnnnnnnnnnnnnnnnnnnnnnnnnnnnnnnnnnnnnnnnnnnnnnnnnnnnnnnnnnnnnnnnnnnnnnnnnnnnnnnnnnnnnnnnnnnnnnnnnnnnnnnnnnnnnnnnnnnnnnnnnnnnnnnnnnnnnnnnnnnnnnnnnnnnnnnnnnnnnnnnnnnnnnnnnnnnnnnnnnnnnnnnnnnnnnnnnnnnnnnnnnnnnnnnnnnnnnnnnnnnnnnnnnnnnnnnnnnnnnnnnnnnnnnnnnnnnnnnnnnnnnnnnnnnnnnnnnnnnnnnnnnnnnnnnnnnnnnnnnnnnnnnnnnnnnnnnnnnnnnnnnnnnnnnnnnnnnnnnnnnnnnnnnnnnnnnnnnnnnnnnnnnnnnnnnnnnnnnnnnnnnnnnnnnnnnnnnnnnnnnnnnnnnnnnnnnnnnnnnnnnnnnnnnnnnnnnnnnnnnnnnnnnnnnnnnnnnnnnnnnnnnnnnnnnnnnnnnnnnnnnnnnnnnnnnnnnnnnnnnnnnnnnnnnnnnnnnnnnnnnnnnnnnnnnnnnnnnnnnnnnnnnnnnnnnnnnnnnnnnnnnnnnnnnnnnnnnnnnnnnnnnnnnnnnnnnnnnnnnnnnnnnnnnnnnnnnnnnnnnnnnnnnnnnnnnnnnnnnnnnnnnnnnnnnnnnnnnnnnnnnnnnnnnnnnnnnnnnnnnnnnnnnnnnnnnnnnnnnnnnnnnnnnnnnnnnnnnnnnnnnnnnnnnnnnnnnnnnnnnnnnnnnnnnnnnnnnnnnnnnnnnnnnnnnnnnnnnnnnnnnnnnnnnnnnnnnnnnnnnnnnnnnnnnnnnnnnnnnnnnnnnnnnnnnnnnnnnnnnnnnnnnnnnnnnnnnnnnnnnnnnnnnnnnnnnnnnnnnnnnnnnnnnnnnnnnnnnnnnnnnnnnnnnnnnnnnnnnnnnnnnnnnnnnnnnnnnnnnnnnnnnnnnnnnnnnnnnnnnnnnnnnnnnnnnnnnnnnnnnnnnnnnnnnnnnnnnnnnnnnnnnnnnnnnnnnnnnnnnnnnnnnnnnnnnnnnnnnnnnnnnnnnnnnnnnnnnnnnnnnnnnnnnnnnnnnnnnnnnnnnnnnnnnnnnnnnnnnnnnnnnnnnnnnnnnnnnnnnnnnnnnnnnnnnnnnnnnnnnnnnnnnnnnnnnnnnnnnnnnnnnnnnnnnnnnnnnnnnnnnnnnnnnnnnnnnnnnnnnnnnnnnnnnnnnnnnnnnnnnnnnnnnnnnnnnnnnnnnnnnnnnnnnnnnnnnnnnnnnnnnnnnnnnnnnnnnnnnnnnnnnnnnnnnnnnnnnnnnnnnnnnnnnnnnnnnnnnnnnnnnnnnnnnnnnnnnnnnnnnnnnnnnnnnnnnnnnnnnnnnnnnnnnnnnnnnnnnnnnnnnnnnnnnnnnnnnnnnnnnnnnnnnnnnnnnnnnnnnnnnnnnnnnnnnnnnnnnnnnnnnnnnnnnnnnnnnnnnnnnnnnnnnnnnnnnnnnnnnnnnnnnnnnnnnnnnnnnnnnnnnnnnnnnnnnnnnnnnnnnnnnnnnnnnnnnnnnnnnnnnnnnnnnnnnnnnnnnnnnnnnnnnnnnnnnnnnnnnnnnnnnnnnnnnnnnnnnnnnnnnnnnnnnnnnnnnnnnnnnnnnnnnnnnnnnnnnnnnnnnnnnnnnnnnnnnnnnnnnnnnnnnnnnnnnnnnnnnnnnnnnnnnnnnnnnnnnnnnnnnnnnnnnnnnnnnnnnnnnnnnnnnnnnnnnnnnnnnnnnnnnnnnnnnnnnnnnnnnnnnnnnnnnnnnnnnnnnnnnnnnnnnnnnnnnnnnnnnnnnnnnnnnnnnnnnnnnnnnnnnnnnnnnnnnnnnnnnnnnnnnnnnnnnnnnnnnnnnnnnnnnnnnnnnnnnnnnnnnnnnnnnnnnnnnnnnnnnnnnnnnnnnnnnnnnnnnnnnnnnnnnnnnnnnnnnnnnnnnnnnnnnnnnnnnnnnnnnnnnnnnnnnnnnnnnnnnnnnnnnnnnnnnnnnnnnnnnnnnnnnnnnnnnnnnnnnnnnnnnnnnnnnnnnnnnnnnnnnnnnnnnnnnnnnnnnnnnnnnnnnnnnnnnnnnnnnnnnnnnnnnnnnnnnnnnnnnnnnnnnnnnnnnnnnnnnnnnnnnnnnnnnnnnnnnnnnnnnnnnnnnnnnnnnnnnnnnnnnnnnnnnnnnnnnnnnnnnnnnnnnnnnnnnnnnnnnnnnnnnnnnnnnnnnnnnnnnnnnnnnnnnnnnnnnnnnnnnnnnnnnnnnnnnnnnnnnnnnnnnnnnnnnnnnnnnnnnnnnnnnnnnnnnnnnnnnnnnnnnnnnnnnnnnnnnnnnnnnnnnnnnnnnnnnnnnnnnnnnnnnnnnnnnnnnnnnnnnnnnnnnnnnnnnnnnnnnnnnnnnnnnnnnnnnnnnnnnnnnnnnnnnnnnnnnnnnnnnnnnnnnnnnnnnnnnnnnnnnnnnnnnnnnnnnnnnnnnnnnnnnnnnnnnnnnnnnnnnnnnnnnnnnnnnnnnnnnnnnnnnnnnnnnnnnnnnnnnnnnnnnnnnnnnnnnnnnnnnnnnnnnnnnnnnnnnnnnnnnnnnnnnnnnnnnnnnnnnnnnnnnnnnnnnnnnnnnnnnnnnnnnnnnnnnnnnnnnnnnnnnnnnnnnnnnnnnnnnnnnnnnnnnnnnnnnnnnnnnnnnnnnnnnnnnnnnnnnnnnnnnnnnnnnnnnnnnnnnnnnnnnnnnnnnnnnnnnnnnnnnnnnnnnnnnnnnnnnnnnnnnnnnnnnnnnnnnnnnnnnnnnnnnnnnnnnnnnnnnnnnnnnnnnnnnnnnnnnnnnnnnnnnnnnnnnnnnnnnnnnnnnnnnnnnnnnnnnnnnnnnnnnnnnnnnnnnnnnnnnnnnnnnnnnnnnnnnnnnnnnnnnnnnnnnnnnnnnnnnnnnnnnnnnnnnnnnnnnnnnnnnnnnnnnnnnnnnnnnnnnnnnnnnnnnnnnnnnnnnnnnnnnnnnnnnnnnnnnnnnnnnnnnnnnnnnnnnnnnnnnnnnnnnnnnnnnnnnnnnnnnnnnnnnnnnnnnnnnnnnnnnnnnnnnnnnnnnnnnnnnnnnnnnnnnnnnnnnnnnnnnnnnnnnnnnnnnnnnnnnnnnnnnnnnnnnnnnnnnnnnnnnnnnnnnnnnnnnnnnnnnnnnnnnnnnnnnnnnnnnnnnnnnnnnnnnnnnnnnnnnnnnnnnnnnnnnnnnnnnnnnnnnnnnnnnnnnnnnnnnnnnnnnnnnnnnnnnnnnnnnnnnnnnnnnnnnnnnnnnnnnnnnnnnnnnnnnnnnnnnnnnnnnnnnnnnnnnnnnnnnnnnnnnnnnnnnnnnnnnnnnnnnnnnnnnnnnnnnnnnnnnnnnnnnnnnnnnnnnnnnnnnnnnnnnnnnnnnnnnnnnnnnnnnnnnnnnnnnnnnnnnnnnnnnnnnnnnnnnnnnnnnnnnnnnnnnnnnnnnnnnnnnnnnnnnnnnnnnnnnnnnnnnnnnnnnnnnnnnnnnnnnnnnnnnnnnnnnnnnnnnnnnnnnnnnnnnnnnnnnnnnnnnnnnnnnnnnnnnnnnnnnnnnnnnnnnnnnnnnnnnnnnnnnnnnnnnnnnnnnnnnnnnnnnnnnnnnnnnnnnnnnnnnnnnnnnnnnnnnnnnnnnnnnnnnnnnnnnnnnnnnnnnnnnnnnnnnnnnnnnnnnnnnnnnnnnnnnnnnnnnnnnnnnnnnnnnnnnnnnnnnnnnnnnnnnnnnnnnnnnnnnnnnnnnnnnnnnnnnnnnnnnnnnnnnnnnnnnnnnnnnnnnnnnnnnnnnnnnnnnnnnnnnnnnnnnnnnnnnnnnnnnnnnnnnnnnnnnnnnnnnnnnnnnnnnnnnnnnnnnnnnnnnnnnnnnnnnnnnnnnnnnnnnnnnnnnnnnnnnnnnnnnnnnnnnnnnnnnnnnnnnnnnnnnnnnnnnnnnnnnnnnnnnnnnnnnnnnnnnnnnnnnnnnnnnnnnnnnnnnnnnnnnnnnnnnnnnnnnnnnnnnnnnnnnnnnnnnnnnnnnnnnnnnnnnnnnnnnnnnnnnnnnnnnnnnnnnnnnnnnnnnnnnnnnnnnnnnnnnnnnnnnnnnnnnnnnnnnnnnnnnnnnnnnnnnnnnnnnnnnnnnnnnnnnnnnnnnnnnnnnnnnnnnnnnnnnnnnnnnnnnnnnnnnnnnnnnnnnnnnnnnnnnnnnnnnnnnnnnnnnnnnnnnnnnnnnnnnnnnnnnnnnnnnnnnnnnnnnnnnnnnnnnnnnnnnnnnnnnnnnnnnnnnnnnnnnnnnnnnnnnnnnnnnnnnnnnnnnnnnnnnnnnnnnnnnnnnnnnnnnnnnnnnnnnnnnnnnnnnnnnnnnnnnnnnnnnnnnnnnnnnnnnnnnnnnnnnnnnnnnnnnnnnnnnnnnnnnnnnnnnnnnnnnnnnnnnnnnnnnnnnnnnnnnnnnnnnnnnnnnnnnnnnnnnnnnnnnnnnnnnnnnnnnnnnnnnnnnnnnnnnnnnnnnnnnnnnnnnnnnnnnnnnnnnnnnnnnnnnnnnnnnnnnnnnnnnnnnnnnnnnnnnnnnnnnnnnnnnnnnnnnnnnnnnnnnnnnnnnnnnnnnnnnnnnnnnnnnnnnnnnnnnnnnnnnnnnnnnnnnnnnnnnnnnnnnnnnnnnnnnnnnnnnnnnnnnnnnnnnnnnnnnnnnnnnnnnnnnnnnnnnnnnnnnnnnnnnnnnnnnnnnnnnnnnnnnnnnnnnnnnnnnnnnnnnnnnnnnnnnnnnnnnnnnnnnnnnnnnnnnnnnnnnnnnnnnnnnnnnnnnnnnnnnnnnnnnnnnnnnnnnnnnnnnnnnnnnnnnnnnnnnnnnnnnnnnnnnnnnnnnnnnnnnnnnnnnnnnnnnnnnnnnnnnnnnnnnnnnnnnnnnnnnnnnnnnnnnnnnnnnnnnnnnnnnnnnnnnnnnnnnnnnnnnnnnnnnnnnnnnnnnnnnnnnnnnnnnnnnnnnnnnnnnnnnnnnnnnnnnnnnnnnnnnnnnnnnnnnnnnnnnnnnnnnnnnnnnnnnnnnnnnnnnnnnnnnnnnnnnnnnnnnnnnnnnnnnnnnnnnnnnnnnnnnnnnnnnnnnnnnnnnnnnnnnnnnnnnnnnnnnnnnnnnnnnnnnnnnnnnnnnnnnnnnnnnnnnnnnnnnnnnnnnnnnnnnnnnnnnnnnnnnnnnnnnnnnnnnnnnnnnnnnnnnnnnnnnnnnnnnnnnnnnnnnnnnnnnnnnnnnnnnnnnnnnnnnnnnnnnnnnnnnnnnnnnnnnnnnnnnnnnnnnnnnnnnnnnnnnnnnnnnnnnnnnnnnnnnnnnnnnnnnnnnnnnnnnnnnnnnnnnnnnnnnnnnnnnnnnnnnnnnnnnnnnnnnnnnnnnnnnnnnnnnnnnnnnnnnnnnnnnnnnnnnnnnnnnnnnnnnnnnnnnnnnnnnnnnnnnnnnnnnnnnnnnnnnnnnnnnnnnnnnnnnnnnnnnnnnnnnnnnnnnnnnnnnnnnnnnnnnnnnnnnnnnnnnnnnnnnnnnnnnnnnnnnnnnnnnnnnnnnnnnnnnnnnnnnnnnnnnnnnnnnnnnnnnnnnnnnnnnnnnnnnnnnnnnnnnnnnnnnnnnnnnnnnnnnnnnnnnnnnnnnnnnnnnnnnnnnnnnnnnnnnnnnnnnnnnnnnnnnnnnnnnnnnnnnnnnnnnnnnnnnnnnnnnnnnnnnnnnnnnnnnnnnnnnnnnnnnnnnnnnnnnnnnnnnnnnnnnnnnnnnnnnnnnnnnnnnnnnnnnnnnnnnnnnnnnnnnnnnnnnnnnnnnnnnnnnnnnnnnnnnnnnnnnnnnnnnnnnnnnnnnnnnnnnnnnnnnnnnnnnnnnnnnnnnnnnnnnnnnnnnnnnnnnnnnnnnnnnnnnnnnnnnnnnnnnnnnnnnnnnnnnnnnnnnnnnnnnnnnnnnnnnnnnnnnnnnnnnnnnnnnnnnnnnnnnnnnnnnnnnnnnnnnnnnnnnnnnnnnnnnnnnnnnnnnnnnnnnnnnnnnnnnnnnnnnnnnnnnnnnnnnnnnnnnnnnnnnnnnnnnnnnnnnnnnnnnnnnnnnnnnnnnnnnnnnnnnnnnnnnnnnnnnnnnnnnnnnnnnnnnnnnnnnnnnnnnnnnnnnnnnnnnnnnnnnnnnnnnnnnnnnnnnnnnnnnnnnnnnnnnnnnnnnnnnnnnnnnnnnnnnnnnnnnnnnnnnnnnnnnnnnnnnnnnnnnnnnnnnnnnnnnnnnnnnnnnnnnnnnnnnnnnnnnnnnnnnnnnnnnnnnnnnnnnnnnnnnnnnnnnnnnnnnnnnnnnnnnnnnnnnnnnnnnnnnnnnnnnnnnnnnnnnnnnnnnnnnnnnnnnnnnnnnnnnnnnnnnnnnnnnnnnnnnnnnnnnnnnnnnnnnnnnnnnnnnnnnnnnnnnnnnnnnnnnnnnnnnnnnnnnnnnnnnnnnnnnnnnnnnnnnnnnnnnnnnnnnnnnnnnnnnnnnnnnnnnnnnnnnnnnnnnnnnnnnnnnnnnnnnnnnnnnnnnnnnnnnnnnnnnnnnnnnnnnnnnnnnnnnnnnnnnnnnnnnnnnnnnnnnnnnnnnnnnnnnnnnnnnnnnnnnnnnnnnnnnnnnnnnnnnnnnnnnnnnnnnnnnnnnnnnnnnnnnnnnnnnnnnnnnnnnnnnnnnnnnnnnnnnnnnnnnnnnnnnnnnnnnnnnnnnnnnnnnnnnnnnnnnnnnnnnnnnnnnnnnnnnnnnnnnnnnnnnnnnnnnnnnnnnnnnnnnnnnnnnnnnnnnnnnnnnnnnnnnnnnnnnnnnnnnnnnnnnnnnnnnnnnnnnnnnnnnnnnnnnnnnnnnnnnnnnnnnnnnnnnnnnnnnnnnnnnnnnnnnnnnnnnnnnnnnnnnnnnnnnnnnnnnnnnnnnnnnnnnnnnnnnnnnnnnnnnnnnnnnnnnnnnnnnnnnnnnnnnnnnnnnnnnnnnnnnnnnnnnnnnnnnnnnnnnnnnnnnnnnnnnnnnnnnnnnnnnnnnnnnnnnnnnnnnnnnnnnnnnnnnnnnnnnnnnnnnnnnnnnnnnnnnnnnnnnnnnnnnnnnnnnnnnnnnnnnnnnnnnnnnnnnnnnnnnnnnnnnnnnnnnnnnnnnnnnnnnnnnnnnnnnnnnnnnnnnnnnnnnnnnnnnnnnnnnnnnnnnnnnnnnnnnnnnnnnnnnnnnnnnnnnnnnnnnnnnnnnnnnnnnnnnnnnnnnnnnnnnnnnnnnnnnnnnnnnnnnnnnnnnnnnnnnnnnnnnnnnnnnnnnnnnnnnnnnnnnnnnnnnnnnnnnnnnnnnnnnnnnnnnnnnnnnnnnnnnnnnnnnnnnnnnnnnnnnnnnnnnnnnnnnnnnnnnnnnnnnnnnnnnnnnnnnnnnnnnnnnnnnnnnnnnnnnnnnnnnnnnnnnnnnnnnnnnnnnnnnnnnnnnnnnnnnnnnnnnnnnnnnnnnnnnnnnnnnnnnnnnnnnnnnnnnnnnnnnnnnnnnnnnnnnnnnnnnnnnnnnnnnnnnnnnnnnnnnnnnnnnnnnnnnnnnnnnnnnnnnnnnnnnnnnnnnnnnnnnnnnnnnnnnnnnnnnnnnnnnnnnnnnnnnnnnnnnnnnnnnnnnnnnnnnnnnnnnnnnnnnnnnnnnnnnnnnnnnnnnnnnnnnnnnnnnnnnnnnnnnnnnnnnnnnnnnnnnnnnnnnnnnnnnnnnnnnnnnnnnnnnnnnnnnnnnnnnnnnnnnnnnnnnnnnnnnnnnnnnnnnnnnnnnnnnnnnnnnnnnnnnnnnnnnnnnnnnnnnnnnnnnnnnnnnnnnnnnnnnnnnnnnnnnnnnnnnnnnnnnnnnnnnnnnnnnnnnnnnnnnnnnnnnnnnnnnnnnnnnnnnnnnnnnnnnnnnnnnnnnnnnnnnnnnnnnnnnnnnnnnnnnnnnnnnnnnnnnnnnnnnnnnnnnnnnnnnnnnnnnnnnnnnnnnnnnnnnnnnnnnnnnnnnnnnnnnnnnnnnnnnnnnnnnnnnnnnnnnnnnnnnnnnnnnnnnnnnnnnnnnnnnnnnnnnnnnnnnnnnnnnnnnnnnnnnnnnnnnnnnnnnnnnnnnnnnnnnnnnnnnnnnnnnnnnnnnnnnnnnnnnnnnnnnnnnnnnnnnnnnnnnnnnnnnnnnnnnnnnnnnnnnnnnnnnnnnnnnnnnnnnnnnnnnnnnnnnnnnnnnnnnnnnnnnnnnnnnnnnnnnnnnnnnnnnnnnnnnnnnnnnnnnnnnnnnnnnnnnnnnnnnnnnnnnnnnnnnnnnnnnnnnnnnnnnnnnnnnnnnnnnnnnnnnnnnnnnnnnnnnnnnnnnnnnnnnnnnnnnnnnnnnnnnnnnnnnnnnnnnnnnnnnnnnnnnnnnnnnnnnnnnnnnnnnnnnnnnnnnnnnnnnnnnnnnnnnnnnnnnnnnnnnnnnnnnnnnnnnnnnnnnnnnnnnnnnnnnnnnnnnnnnnnnnnnnnnnnnnnnnnnnnnnnnnnnnnnnnnnnnnnnnnnnnnnnnnnnnnnnnnnnnnnnnnnnnnnnnnnnnnnnnnnnnnnnnnnnnnnnnnnnnnnnnnnnnnnnnnnnnnnnnnnnnnnnnnnnnnnnnnnnnnnnnnnnnnnnnnnnnnnnnnnnnnnnnnnnnnnnnnnnnnnnnnnnnnnnnnnnnnnnnnnnnnnnnnnnnnnnnnnnnnnnnnnnnnnnnnnnnnnnnnnnnnnnnnnnnnnnnnnnnnnnnnnnnnnnnnnnnnnnnnnnnnnnnnnnnnnnnnnnnnnnnnnnnnnnnnnnnnnnnnnnnnnnnnnnnnnnnnnnnnnnnnnnnnnnnnnnnnnnnnnnnnnnnnnnnnnnnnnnnnnnnnnnnnnnnnnnnnnnnnnnnnnnnnnnnnnnnnnnnnnnnnnnnnnnnnnnnnnnnnnnnnnnnnnnnnnnnnnnnnnnnnnnnnnnnnnnnnnnnnnnnnnnnnnnnnnnnnnnnnnnnnnnnnnnnnnnnnnnnnnnnnnnnnnnnnnnnnnnnnnnnnnnnnnnnnnnnnnnnnnnnnnnnnnnnnnnnnnnnnnnnnnnnnnnnnnnnnnnnnnnnnnnnnnnnnnnnnnnnnnnnnnnnnnnnnnnnnnnnnnnnnnnnnnnnnnnnnnnnnnnnnnnnnnnnnnnnnnnnnnnnnnnnnnnnnnnnnnnnnnnnnnnnnnnnnnnnnnnnnnnnnnnnnnnnnnnnnnnnnnnnnnnnnnnnnnnnnnnnnnnnnnnnnnnnnnnnnnnnnnnnnnnnnnnnnnnnnnnnnnnnnnnnnnnnnnnnnnnnnnnnnnnnnnnnnnnnnnnnnnnnnnnnnnnnnnnnnnnnnnnnnnnnnnnnnnnnnnnnnnnnnnnnnnnnnnnnnnnnnnnnnnnnnnnnnnnnnnnnnnnnnnnnnnnnnnnnnnnnnnnnnnnnnnnnnnnnnnnnnnnnnnnnnnnnnnnnnnnnnnnnnnnnnnnnnnnnnnnnnnnnnnnnnnnnnnnnnnnnnnnnnnnnnnnnnnnnnnnnnnnnnnnnnnnnnnnnnnnnnnnnnnnnnnnnnnnnnnnnnnnnnnnnnnnnnnnnnnnnnnnnnnnnnnnnnnnnnnnnnnnnnnnnnnnnnnnnnnnnnnnnnnnnnnnnnnnnnnnnnnnnnnnnnnnnnnnnnnnnnnnnnnnnnnnnnnnnnnnnnnnnnnnnnnnnnnnnnnnnnnnnnnnnnnnnnnnnnnnnnnnnnnnnnnnnnnnnnnnnnnnnnnnnnnnnnnnnnnnnnnnnnnnnnnnnnnnnnnnnnnnnnnnnnnnnnnnnnnnnnnnnnnnnnnnnnnnnnnnnnnnnnnnnnnnnnnnnnnnnnnnnnnnnnnnnnnnnnnnnnnnnnnnnnnnnnnnnnnnnnnnnnnnnnnnnnnnnnnnnnnnnnnnnnnnnnnnnnnnnnnnnnnnnnnnnnnnnnnnnnnnnnnnnnnnnnnnnnnnnnnnnnnnnnnnnnnnnnnnnnnnnnnnnnnnnnnnnnnnnnnnnnnnnnnnnnnnnnnnnnnnnnnnnnnnnnnnnnnnnnnnnnnnnnnnnnnnnnnnnnnnnnnnnnnnnnnnnnnnnnnnnnnnnnnnnnnnnnnnnnnnnnnnnnnnnnnnnnnnnnnnnnnnnnnnnnnnnnnnnnnnnnnnnnnnnnnnnnnnnnnnnnnnnnnnnnnnnnnnnnnnnnnnnnnnnnnnnnnnnnnnnnnnnnnnnnnnnnnnnnnnnnnnnnnnnnnnnnnnnnnnnnnnnnnnnnnnnnnnnnnnnnnnnnnnnnnnnnnnnnnnnnnnnnnnnnnnnnnnnnnnnnnnnnnnnnnnnnnnnnnnnnnnnnnnnnnnnnnnnnnnnnnnnnnnnnnnnnnnnnnnnnnnnnnnnnnnnnnnnnnnnnnnnnnnnnnnnnnnnnnnnnnnnnnnnnnnnnnnnnnnnnnnnnnnnnnnnnnnnnnnnnnnnnnnnnnnnnnnnnnnnnnnnnnnnnnnnnnnnnnnnnnnnnnnnnnnnnnnnnnnnnnnnnnnnnnnnnnnnnnnnnnnnnnnnnnnnnnnnnnnnnnnnnnnnnnnnnnnnnnnnnnnnnnnnnnnnnnnnnnnnnnnnnnnnnnnnnnnnnnnnnnnnnnnnnnnnnnnnnnnnnnnnnnnnnnnnnnnnnnnnnnnnnnnnnnnnnnnnnnnnnnnnnnnnnnnnnnnnnnnnnnnnnnnnnnnnnnnnnnnnnnnnnnnnnnnnnnnnnnnnnnnnnnnnnnnnnnnnnnnnnnnnnnnnnnnnnnnnnnnnnnnnnnnnnnnnnnnnnnnnnnnnnnnnnnnnnnnnnnnnnnnnnnnnnnnnnnnnnnnnnnnnnnnnnnnnnnnnnnnnnnnnnnnnnnnnnnnnnnnnnnnnnnnnnnnnnnnnnnnnnnnnnnnnnnnnnnnnnnnnnnnnnnnnnnnnnnnnnnnnnnnnnnnnnnnnnnnnnnnnnnnnnnnnnnnnnnnnnnnnnnnnnnnnnnnnnnnnnnnnnnnnnnnnnnnnnnnnnnnnnnnnnnnnnnnnnnnnnnnnnnnnnnnnnnnnnnnnnnnnnnnnnnnnnnnnnnnnnnnnnnnnnnnnnnnnnnnnnnnnnnnnnnnnnnnnnnnnnnnnnnnnnnnnnnnnnnnnnnnnnnnnnnnnnnnnnnnnnnnnnnnnnnnnnnnnnnnnnnnnnnnnnnnnnnnnnnnnnnnnnnnnnnnnnnnnnnnnnnnnnnnnnnnnnnnnnnnnnnnnnnnnnnnnnnnnnnnnnnnnnnnnnnnnnnnnnnnnnnnnnnnnnnnnnnnnnnnnnnnnnnnnnnnnnnnnnnnnnnnnnnnnnnnnnnnnnnnnnnnnnnnnnnnnnnnnnnnnnnnnnnnnnnnnnnnnnnnnnnnnnnnnnnnnnnnnnnnnnnnnnnnnnnnnnnnnnnnnnnnnnnnnnnnnnnnnnnnnnnnnnnnnnnnnnnnnnnnnnnnnnnnnnnnnnnnnnnnnnnnnnnnnnnnnnnnnnnnnnnnnnnnnnnnnnnnnnnnnnnnnnnnnnnnnnnnnnnnnnnnnnnnnnnnnnnnnnnnnnnnnnnnnnnnnnnnnnnnnnnnnnnnnnnnnnnnnnnnnnnnnnnnnnnnnnnnnnnnnnnnnnnnnnnnnnnnnnnnnnnnnnnnnnnnnnnnnnnnnnnnnnnnnnnnnnnnnnnnnnnnnnnnnnnnnnnnnnnnnnnnnnnnnnnnnnnnnnnnnnnnnnnnnnnnnnnnnnnnnnnnnnnnnnnnnnnnnnnnnnnnnnnnnnnnnnnnnnnnnnnnnnnnnnnnnnnnnnnnnnnnnnnnnnnnnnnnnnnnnnnnnnnnnnnnnnnnnnnnnnnnnnnnnnnnnnnnnnnnnnnnnnnnnnnnnnnnnnnnnnnnnnnnnnnnnnnnnnnnnnnnnnnnnnnnnnnnnnnnnnnnnnnnnnnnnnnnnnnnnnnnnnnnnnnnnnnnnnnnnnnnnnnnnnnnnnnnnnnnnnnnnnnnnnnnnnnnnnnnnnnnnnnnnnnnnnnnnnnnnnnnnnnnnnnnnnnnnnnnnnnnnnnnnnnnnnnnnnnnnnnnnnnnnnnnnnnnnnnnnnnnnnnnnnnnnnnnnnnnnnnnnnnnnnnnnnnnnnnnnnnnnnnnnnnnnnnnnnnnnnnnnnnnnnnnnnnnnnnnnnnnnnnnnnnnnnnnnnnnnnnnnnnnnnnnnnnnnnnnnnnnnnnnnnnnnnnnnnnnnnnnnnnnnnnnnnnnnnnnnnnnnnnnnnnnnnnnnnnnnnnnnnnnnnnnnnnnnnnnnnnnnnnnnnnnnnnnnnnnnnnnnnnnnnnnnnnnnnnnnnnnnnnnnnnnnnnnnnnnnnnnnnnnnnnnnnnnnnnnnnnnnnnnnnnnnnnnnnnnnnnnnnnnnnnnnnnnnnnnnnnnnnnnnnnnnnnnnnnnnnnnnnnnnnnnnnnnnnnnnnnnnnnnnnnnnnnnnnnnnnnnnnnnnnnnnnnnnnnnnnnnnnnnnnnnnnnnnnnnnnnnnnnnnnnnnnnnnnnnnnnnnnnnnnnnnnnnnnnnnnnnnnnnnnnnnnnnnnnnnnnnnnnnnnnnnnnnnnnnnnnnnnnnnnnnnnnnnnnnnnnnnnnnnnnnnnnnnnnnnnnnnnnnnnnnnnnnnnnnnnnnnnnnnnnnnnnnnnnnnnnnnnnnnnnnnnnnnnnnnnnnnnnnnnnnnnnnnnnnnnnnnnnnnnnnnnnnnnnnnnnnnnnnnnnnnnnnnnnnnnnnnnnnnnnnnnnnnnnnnnnnnnnnnnnnnnnnnnnnnnnnnnnnnnnnnnnnnnnnnnnnnnnnnnnnnnnnnnnnnnnnnnnnnnnnnnnnnnnnnnnnnnnnnnnnnnnnnnnnnnnnnnnnnnnnnnnnnnnnnnnnnnnnnnnnnnnnnnnnnnnnnnnnnnnnnnnnnnnnnnnnnnnnnnnnnnnnnnnnnnnnnnnnnnnnnnnnnnnnnnnnnnnnnnnnnnnnnnnnnnnnnnnnnnnnnnnnnnnnnnnnnnnnnnnnnnnnnnnnnnnnnnnnnnnnnnnnnnnnnnnnnnnnnnnnnnnnnnnnnnnnnnnnnnnnnnnnnnnnnnnnnnnnnnnnnnnnnnnnnnnnnnnnnnnnnnnnnnnnnnnnnnnnnnnnnnnnnnnnnnnnnnnnnnnnnnnnnnnnnnnnnnnnnnnnnnnnnnnnnnnnnnnnnnnnnnnnnnnnnnnnnnnnnnnnnnnnnnnnnnnnnnnnnnnnnnnnnnnnnnnnnnnnnnnnnnnnnnnnnnnnnnnnnnnnnnnnnnnnnnnnnnnnnnnnnnnnnnnnnnnnnnnnnnnnnnnnnnnnnnnnnnnnnnnnnnnnnnnnnnnnnnnnnnnnnnnnnnnnnnnnnnnnnnnnnnnnnnnnnnnnnnnnnnnnnnnnnnnnnnnnnnnnnnnnnnnnnnnnnnnnnnnnnnnnnnnnnnnnnnnnnnnnnnnnnnnnnnnnnnnnnnnnnnnnnnnnnnnnnnnnnnnnnnnnnnnnnnnnnnnnnnnnnnnnnnnnnnnnnnnnnnnnnnnnnnnnnnnnnnnnnnnnnnnnnnnnnnnnnnnnnnnnnnnnnnnnnnnnnnnnnnnnnnnnnnnnnnnnnnnnnnnnnnnnnnnnnnnnnnnnnnnnnnnnnnnnnnnnnnnnnnnnnnnnnnnnnnnnnnnnnnnnnnnnnnnnnnnnnnnnnnnnnnnnnnnnnnnnnnnnnnnnnnnnnnnnnnnnnnnnnnnnnnnnnnnnnnnnnnnnnnnnnnnnnnnnnnnnnnnnnnnnnnnnnnnnnnnnnnnnnnnnnnnnnnnnnnnnnnnnnnnnnnnnnnnnnnnnnnnnnnnnnnnnnnnnnnnnnnnnnnnnnnnnnnnnnnnnnnnnnnnnnnnnnnnnnnnnnnnnnnnnnnnnnnnnnnnnnnnnnnnnnnnnnnnnnnnnnnnnnnnnnnnnnnnnnnnnnnnnnnnnnnnnnnnnnnnnnnnnnnnnnnnnnnnnnnnnnnnnnnnnnnnnnnnnnnnnnnnnnnnnnnnnnnnnnnnnnnnnnnnnnnnnnnnnnnnnnnnnnnnnnnnnnnnnnnnnnnnnnnnnnnnnnnnnnnnnnnnnnnnnnnnnnnnnnnnnnnnnnnnnnnnnnnnnnnnnnnnnnnnnnnnnnnnnnnnnnnnnnnnnnnnnnnnnnnnnnnnnnnnnnnnnnnnnnnnnnnnnnnnnnnnnnnnnnnnnnnnnnnnnnnnnnnnnnnnnnnnnnnnnnnnnnnnnnnnnnnnnnnnnnnnnnnnnnnnnnnnnnnnnnnnnnnnnnnnnnnnnnnnnnnnnnnnnnnnnnnnnnnnnnnnnnnnnnnnnnnnnnnnnnnnnnnnnnnnnnnnnnnnnnnnnnnnnnnnnnnnnnnnnnnnnnnnnnnnnnnnnnnnnnnnnnnnnnnnnnnnnnnnnnnnnnnnnnnnnnnnnnnnnnnnnnnnnnnnnnnnnnnnnnnnnnnnnnnnnnnnnnnnnnnnnnnnnnnnnnnnnnnnnnnnnnnnnnnnnnnnnnnnnnnnnnnnnnnnnnnnnnnnnnnnnnnnnnnnnnnnnnnnnnnnnnnnnnnnnnnnnnnnnnnnnnnnnnnnnnnnnnnnnnnnnnnnnnnnnnnnnnnnnnnnnnnnnnnnnnnnnnnnnnnnnnnnnnnnnnnnnnnnnnnnnnnnnnnnnnnnnnnnnnnnnnnnnnnnnnnnnnnnnnnnnnnnnnnnnnnnnnnnnnnnnnnnnnnnnnnnnnnnnnnnnnnnnnnnnnnnnnnnnnnnnnnnnnnnnnnnnnnnnnnnnnnnnnnnnnnnnnnnnnnnnnnnnnnnnnnnnnnnnnnnnnnnnnnnnnnnnnnnnnnnnnnnnnnnnnnnnnnnnnnnnnnnnnnnnnnnnnnnnnnnnnnnnnnnnnnnnnnnnnnnnnnnnnnnnnnnnnnnnnnnnnnnnnnnnnnnnnnnnnnnnnnnnnnnnnnnnnnnnnnnnnnnnnnnnnnnnnnnnnnnnnnnnnnnnnnnnnnnnnnnnnnnnnnnnnnnnnnnnnnnnnnnnnnnnnnnnnnnnnnnnnnnnnnnnnnnnnnnnnnnnnnnnnnnnnnnnnnnnnnnnnnnnnnnnnnnnnnnnnnnnnnnnnnnnnnnnnnnnnnnnnnnnnnnnnnnnnnnnnnnnnnnnnnnnnnnnnnnnnnnnnnnnnnnnnnnnnnnnnnnnnnnnnnnnnnnnnnnnnnnnnnnnnnnnnnnnnnnnnnnnnnnnnnnnnnnnnnnnnnnnnnnnnnnnnnnnnnnnnnnnnnnnnnnnnnnnnnnnnnnnnnnnnnnnnnnnnnnnnnnnnnnnnnnnnnnnnnnnnnnnnnnnnnnnnnnnnnnnnnnnnnnnnnnnnnnnnnnnnnnnnnnnnnnnnnnnnnnnnnnnnnnnnnnnnnnnnnnnnnnnnnnnnnnnnnnnnnnnnnnnnnnnnnnnnnnnnnnnnnnnnnnnnnnnnnnnnnnnnnnnnnnnnnnnnnnnnnnnnnnnnnnnnnnnnnnnnnnnnnnnnnnnnnnnnnnnnnnnnnnnnnnnnnnnnnnnnnnnnnnnnnnnnnnnnnnnnnnnnnnnnnnnnnnnnnnnnnnnnnnnnnnnnnnnnnnnnnnnnnnnnnnnnnnnnnnnnnnnnnnnnnnnnnnnnnnnnnnnnnnnnnnnnnnnnnnnnnnnnnnnnnnnnnnnnnnnnnnnnnnnnnnnnnnnnnnnnnnnnnnnnnnnnnnnnnnnnnnnnnnnnnnnnnnnnnnnnnnnnnnnnnnnnnnnnnnnnnnnnnnnnnnnnnnnnnnnnnnnnnnnnnnnnnnnnnnnnnnnnnnnnnnnnnnnnnnnnnnnnnnnnnnnnnnnnnnnnnnnnnnnnnnnnnnnnnnnnnnnnnnnnnnnnnnnnnnnnnnnnnnnnnnnnnnnnnnnnnnnnnnnnnnnnnnnnnnnnnnnnnnnnnnnnnnnnnnnnnnnnnnnnnnnnnnnnnnnnnnnnnnnnnnnnnnnnnnnnnnnnnnnnnnnnnnnnnnnnnnnnnnnnnnnnnnnnnnnnnnnnnnnnnnnnnnnnnnnnnnnnnnnnnnnnnnnnnnnnnnnnnnnnnnnnnnnnnnnnnnnnnnnnnnnnnnnnnnnnnnnnnnnnnnnnnnnnnnnnnnnnnnnnnnnnnnnnnnnnnnnnnnnnnnnnnnnnnnnnnnnnnnnnnnnnnnnnnnnnnnnnnnnnnnnnnnnnnnnnnnnnnnnnnnnnnnnnnnnnnnnnnnnnnnnnnnnnnnnnnnnnnnnnnnnnnnnnnnnnnnnnnnnnnnnnnnnnnnnnnnnnnnnnnnnnnnnnnnnnnnnnnnnnnnnnnnnnnnnnnnnnnnnnnnnnnnnnnnnnnnnnnnnnnnnnnnnnnnnnnnnnnnnnnnnnnnnnnnnnnnnnnnnnnnnnnnnnnnnnnnnnnnnnnnnnnnnnnnnnnnnnnnnnnnnnnnnnnnnnnnnnnnnnnnnnnnnnnnnnnnnnnnnnnnnnnnnnnnnnnnnnnnnnnnnnnnnnnnnnnnnnnnnnnnnnnnnnnnnnnnnnnnnnnnnnnnnnnnnnnnnnnnnnnnnnnnnnnnnnnnnnnnnnnnnnnnnnnnnnnnnnnnnnnnnnnnnnnnnnnnnnnnnnnnnnnnnnnnnnnnnnnnnnnnnnnnnnnnnnnnnnnnnnnnnnnnnnnnnnnnnnnnnnnnnnnnnnnnnnnnnnnnnnnnnnnnnnnnnnnnnnnnnnnnnnnnnnnnnnnnnnnnnnnnnnnnnnnnnnnnnnnnnnnnnnnnnnnnnnnnnnnnnnnnnnnnnnnnnnnnnnnnnnnnnnnnnnnnnnnnnnnnnnnnnnnnnnnnnnnnnnnnnnnnnnnnnnnnnnnnnnnnnnnnnnnnnnnnnnnnnnnnnnnnnnnnnnnnnnnnnnnnnnnnnnnnnnnnnnnnnnnnnnnnnnnnnnnnnnnnnnnnnnnnnnnnnnnnnnnnnnnnnnnnnnnnnnnnnnnnnnnnnnnnnnnnnnnnnnnnnnnnnnnnnnnnnnnnnnnnnnnnnnnnnnnnnnnnnnnnnnnnnnnnnnnnnnnnnnnnnnnnnnnnnnnnnnnnnnnnnnnnnnnnnnnnnnnnnnnnnnnnnnnnnnnnnnnnnnnnnnnnnnnnnnnnnnnnnnnnnnnnnnnnnnnnnnnnnnnnnnnnnnnnnnnnnnnnnnnnnnnnnnnnnnnnnnnnnnnnnnnnnnnnnnnnnnnnnnnnnnnnnnnnnnnnnnnnnnnnnnnnnnnnnnnnnnnnnnnnnnnnnnnnnnnnnnnnnnnnnnnnnnnnnnnnnnnnnnnnnnnnnnnnnnnnnnnnnnnnnnnnnnnnnnnnnnnnnnnnnnnnnnnnnnnnnnnnnnnnnnnnnnnnnnnnnnnnnnnnnnnnnnnnnnnnnnnnnnnnnnnnnnnnnnnnnnnnnnnnnnnnnnnnnnnnnnnnnnnnnnnnnnnnnnnnnnnnnnnnnnnnnnnnnnnnnnnnnnnnnnnnnnnnnnnnnnnnnnnnnnnnnnnnnnnnnnnnnnnnnnnnnnnnnnnnnnnnnnnnnnnnnnnnnnnnnnnnnnnnnnnnnnnnnnnnnnnnnnnnnnnnnnnnnnnnnnnnnnnnnnnnnnnnnnnnnnnnnnnnnnnnnnnnnnnnnnnnnnnnnnnnnnnnnnnnnnnnnnnnnnnnnnnnnnnnnnnnnnnnnnnnnnnnnnnnnnnnnnnnnnnnnnnnnnnnnnnnnnnnnnnnnnnnnnnnnnnnnnnnnnnnnnnnnnnnnnnnnnnnnnnnnnnnnnnnnnnnnnnnnnnnnnnnnnnnnnnnnnnnnnnnnnnnnnnnnnnnnnnnnnnnnnnnnnnnnnnnnnnnnnnnnnnnnnnnnnnnnnnnnnnnnnnnnnnnnnnnnnnnnnnnnnnnnnnnnnnnnnnnnnnnnnnnnnnnnnnnnnnnnnnnnnnnnnnnnnnnnnnnnnnnnnnnnnnnnnnnnnnnnnnnnnnnnnnnnnnnnnnnnnnnnnnnnnnnnnnnnnnnnnnnnnnnnnnnnnnnnnnnnnnnnnnnnnnnnnnnnnnnnnnnnnnnnnnnnnnnnnnnnnnnnnnnnnnnnnnnnnnnnnnnnnnnnnnnnnnnnnnnnnnnnnnnnnnnnnnnnnnnnnnnnnnnnnnnnnnnnnnnnnnnnnnnnnnnnnnnnnnnnnnnnnnnnnnnnnnnnnnnnnnnnnnnnnnnnnnnnnnnnnnnnnnnnnnnnnnnnnnnnnnnnnnnnnnnnnnnnnnnnnnnnnnnnnnnnnnnnnnnnnnnnnnnnnnnnnnnnnnnnnnnnnnnnnnnnnnnnnnnnnnnnnnnnnnnnnnnnnnnnnnnnnnnnnnnnnnnnnnnnnnnnnnnnnnnnnnnnnnnnnnnnnnnnnnnnnnnnnnnnnnnnnnnnnnnnnnnnnnnnnnnnnnnnnnnnnnnnnnnnnnnnnnnnnnnnnnnnnnnnnnnnnnnnnnnnnnnnnnnnnnnnnnnnnnnnnnnnnnnnnnnnnnnnnnnnnnnnnnnnnnnnnnnnnnnnnnnnnnnnnnnnnnnnnnnnnnnnnnnnnnnnnnnnnnnnnnnnnnnnnnnnnnnnnnnnnnnnnnnnnnnnnnnnnnnnnnnnnnnnnnnnnnnnnnnnnnnnnnnnnnnnnnnnnnnnnnnnnnnnnnnnnnnnnnnnnnnnnnnnnnnnnnnnnnnnnnnnnnnnnnnnnnnnnnnnnnnnnnnnnnnnnnnnnnnnnnnnnnnnnnnnnnnnnnnnnnnnnnnnnnnnnnnnnnnnnnnnnnnnnnnnnnnnnnnnnnnnnnnnnnnnnnnnnnnnnnnnnnnnnnnnnnnnnnnnnnnnnnnnnnnnnnnnnnnnnnnnnnnnnnnnnnnnnnnnnnnnnnnnnnnnnnnnnnnnnnnnnnnnnnnnnnnnnnnnnnnnnnnnnnnnnnnnnnnnnnnnnnnnnnnnnnnnnnnnnnnnnnnnnnnnnnnnnnnnnnnnnnnnnnnnnnnnnnnnnnnnnnnnnnnnnnnnnnnnnnnnnnnnnnnnnnnnnnnnnnnnnnnnnnnnnnnnnnnnnnnnnnnnnnnnnnnnnnnnnnnnnnnnnnnnnnnnnnnnnnnnnnnnnnnnnnnnnnnnnnnnnnnnnnnnnnnnnnnnnnnnnnnnnnnnnnnnnnnnnnnnnnnnnnnnnnnnnnnnnnnnnnnnnnnnnnnnnnnnnnnnnnnnnnnnnnnnnnnnnnnnnnnnnnnnnnnnnnnnnnnnnnnnnnnnnnnnnnnnnnnnnnnnnnnnnnnnnnnnnnnnnnnnnnnnnnnnnnnnnnnnnnnnnnnnnnnnnnnnnnnnnnnnnnnnnnnnnnnnnnnnnnnnnnnnnnnnnnnnnnnnnnnnnnnnnnnnnnnnnnnnnnnnnnnnnnnnnnnnnnnnnnnnnnnnnnnnnnnnnnnnnnnnnnnnnnnnnnnnnnnnnnnnnnnnnnnnnnnnnnnnnnnnnnnnnnnnnnnnnnnnnnnnnnnnnnnnnnnnnnnnnnnnnnnnnnnnnnnnnnnnnnnnnnnnnnnnnnnnnnnnnnnnnnnnnnnnnnnnnnnnnnnnnnnnnnnnnnnnnnnnnnnnnnnnnnnnnnnnnnnnnnnnnnnnnnnnnnnnnnnnnnnnnnnnnnnnnnnnnnnnnnnnnnnnnnnnnnnnnnnnnnnnnnnnnnnnnnnnnnnnnnnnnnnnnnnnnnnnnnnnnnnnnnnnnnnnnnnnnnnnnnnnnnnnnnnnnnnnnnnnnnnnnnnnnnnnnnnnnnnnnnnnnnnnnnnnnnnnnnnnnnnnnnnnnnnnnnnnnnnnnnnnnnnnnnnnnnnnnnnnnnnnnnnnnnnnnnnnnnnnnnnnnnnnnnnnnnnnnnnnnnnnnnnnnnnnnnnnnnnnnnnnnnnnnnnnnnnnnnnnnnnnnnnnnnnnnnnnnnnnnnnnnnnnnnnnnnnnnnnnnnnnnnnnnnnnnnnnnnnnnnnnnnnnnnnnnnnnnnnnnnnnnnnnnnnnnnnnnnnnnnnnnnnnnnnnnnnnnnnnnnnnnnnnnnnnnnnnnnnnnnnnnnnnnnnnnnnnnnnnnnnnnnnnnnnnnnnnnnnnnnnnnnnnnnnnnnnnnnnnnnnnnnnnnnnnnnnnnnnnnnnnnnnnnnnnnnnnnnnnnnnnnnnnnnnnnnnnnnnnnnnnnnnnnnnnnnnnnnnnnnnnnnnnnnnnnnnnnnnnnnnnnnnnnnnnnnnnnnnnnnnnnnnnnnnnnnnnnnnnnnnnnnnnnnnnnnnnnnnnnnnnnnnnnnnnnnnnnnnnnnnnnnnnnnnnnnnnnnnnnnnnnnnnnnnnnnnnnnnnnnnnnnnnnnnnnnnnnnnnnnnnnnnnnnnnnnnnnnnnnnnnnnnnnnnnnnnnnnnnnnnnnnnnnnnnnnnnnnnnnnnnnnnnnnnnnnnnnnnnnnnnnnnnnnnnnnnnnnnnnnnnnnnnnnnnnnnnnnnnnnnnnnnnnnnnnnnnnnnnnnnnnnnnnnnnnnnnnnnnnnnnnnnnnnnnnnnnnnnnnnnnnnnnnnnnnnnnnnnnnnnnnnnnnnnnnnnnnnnnnnnnnnnnnnnnnnnnnnnnnnnnnnnnnnnnnnnnnnnnnnnnnnnnnnnnnnnnnnnnnnnnnnnnnnnnnnnnnnnnnnnnnnnnnnnnnnnnnnnnnnnnnnnnnnnnnnnnnnnnnnnnnnnnnnnnnnnnnnnnnnnnnnnnnnnnnnnnnnnnnnnnnnnnnnnnnnnnnnnnnnnnnnnnnnnnnnnnnnnnnnnnnnnnnnnnnnnnnnnnnnnnnnnnnnnnnnnnnnnnnnnnnnnnnnnnnnnnnnnnnnnnnnnnnnnnnnnnnnnnnnnnnnnnnnnnnnnnnnnnnnnnnnnnnnnnnnnnnnnnnnnnnnnnnnnnnnnnnnnnnnnnnnnnnnnnnnnnnnnnnnnnnnnnnnnnnnnnnnnnnnnnnnnnnnnnnnnnnnnnnnnnnnnnnnnnnnnnnnnnnnnnnnnnnnnnnnnnnnnnnnnnnnnnnnnnnnnnnnnnnnnnnnnnnnnnnnnnnnnnnnnnnnnnnnnnnnnnnnnnnnnnnnnnnnnnnnnnnnnnnnnnnnnnnnnnnnnnnnnnnnnnnnnnnnnnnnnnnnnnnnnnnnnnnnnnnnnnnnnnnnnnnnnnnnnnnnnnnnnnnnnnnnnnnnnnnnnnnnnnnnnnnnnnnnnnnnnnnnnnnnnnnnnnnnnnnnnnnnnnnnnnnnnnnnnnnnnnnnnnnnnnnnnnnnnnnnnnnnnnnnnnnnnnnnnnnnnnnnnnnnnnnnnnnnnnnnnnnnnnnnnnnnnnnnnnnnnnnnnnnnnnnnnnnnnnnnnnnnnnnnnnnnnnnnnnnnnnnnnnnnnnnnnnnnnnnnnnnnnnnnnnnnnnnnnnnnnnnnnnnnnnnnnnnnnnnnnnnnnnnnnnnnnnnnnnnnnnnnnnnnnnnnnnnnnnnnnnnnnnnnnnnnnnnnnnnnnnnnnnnnnnnnnnnnnnnnnnnnnnnnnnnnnnnnnnnnnnnnnnnnnnnnnnnnnnnnnnnnnnnnnnnnnnnnnnnnnnnnnnnnnnnnnnnnnnnnnnnnnnnnnnnnnnnnnnnnnnnnnnnnnnnnnnnnnnnnnnnnnnnnnnnnnnnnnnnnnnnnnnnnnnnnnnnnnnnnnnnnnnnnnnnnnnnnnnnnnnnnnnnnnnnnnnnnnnnnnnnnnnnnnnnnnnnnnnnnnnnnnnnnnnnnnnnnnnnnnnnnnnnnnnnnnnnnnnnnnnnnnnnnnnnnnnnnnnnnnnnnnnnnnnnnnnnnnnnnnnnnnnnnnnnnnnnnnnnnnnnnnnnnnnnnnnnnnnnnnnnnnnnnnnnnnnnnnnnnnnnnnnnnnnnnnnnnnnnnnnnnnnnnnnnnnnnnnnnnnnnnnnnnnnnnnnnnnnnnnnnnnnnnnnnnnnnnnnnnnnnnnnnnnnnnnnnnnnnnnnnnnnnnnnnnnnnnnnnnnnnnnnnnnnnnnnnnnnnnnnnnnnnnnnnnnnnnnnnnnnnnnnnnnnnnnnnnnnnnnnnnnnnnnnnnnnnnnnnnnnnnnnnnnnnnnnnnnnnnnnnnnnnnnnnnnnnnnnnnnnnnnnnnnnnnnnnnnnnnnnnnnnnnnnnnnnnnnnnnnnnnnnnnnnnnnnnnnnnnnnnnnnnnnnnnnnnnnnnnnnnnnnnnnnnnnnnnnnnnnnnnnnnnnnnnnnnnnnnnnnnnnnnnnnnnnnnnnnnnnnnnnnnnnnnnnnnnnnnnnnnnnnnnnnnnnnnnnnnnnnnnnnnnnnnnnnnnnnnnnnnnnnnnnnnnnnnnnnnnnnnnnnnnnnnnnnnnnnnnnnnnnnnnnnnnnnnnnnnnnnnnnnnnnnnnnnnnnnnnnnnnnnnnnnnnnnnnnnnnnnnnnnnnnnnnnnnnnnnnnnnnnnnnnnnnnnnnnnnnnnnnnnnnnnnnnnnnnnnnnnnnnnnnnnnnnnnnnnnnnnnnnnnnnnnnnnnnnnnnnnnnnnnnnnnnnnnnnnnnnnnnnnnnnnnnnnnnnnnnnnnnnnnnnnnnnnnnnnnnnnnnnnnnnnnnnnnnnnnnnnnnnnnnnnnnnnnnnnnnnnnnnnnnnnnnnnnnnnnnnnnnnnnnnnnnnnnnnnnnnnnnnnnnnnnnnnnnnnnnnnnnnnnnnnnnnnnnnnnnnnnnnnnnnnnnnnnnnnnnnnnnnnnnnnnnnnnnnnnnnnnnnnnnnnnnnnnnnnnnnnnnnnnnnnnnnnnnnnnnnnnnnnnnnnnnnnnnnnnnnnnnnnnnnnnnnnnnnnnnnnnnnnnnnnnnnnnnnnnnnnnnnnnnnnnnnnnnnnnnnnnnnnnnnnnnnnnnnnnnnnnnnnnnnnnnnnnnnnnnnnnnnnnnnnnnnnnnnnnnnnnnnnnnnnnnnnnnnnnnnnnnnnnnnnnnnnnnnnnnnnnnnnnnnnnnnnnnnnnnnnnnnnnnnnnnnnnnnnnnnnnnnnnnnnnnnnnnnnnnnnnnnnnnnnnnnnnnnnnnnnnnnnnnnnnnnnnnnnnnnnnnnnnnnnnnnnnnnnnnnnnnnnnnnnnnnnnnnnnnnnnnnnnnnnnnnnnnnnnnnnnnnnnnnnnnnnnnnnnnnnnnnnnnnnnnnnnnnnnnnnnnnnnnnnnnnnnnnnnnnnnnnnnnnnnnnnnnnnnnnnnnnnnnnnnnnnnnnnnnnnnnnnnnnnnnnnnnnnnnnnnnnnnnnnnnnnnnnnnnnnnnnnnnnnnnnnnnnnnnnnnnnnnnnnnnnnnnnnnnnnnnnnnnnnnnnnnnnnnnnnnnnnnnnnnnnnnnnnnnnnnnnnnnnnnnnnnnnnnnnnnnnnnnnnnnnnnnnnnnnnnnnnnnnnnnnnnnnnnnnnnnnnnnnnnnnnnnnnnnnnnnnnnnnnnnnnnnnnnnnnnnnnnnnnnnnnnnnnnnnnnnnnnnnnnnnnnnnnnnnnnnnnnnnnnnnnnnnnnnnnnnnnnnnnnnnnnnnnnnnnnnnnnnnnnnnnnnnnnnnnnnnnnnnnnnnnnnnnnnnnnnnnnnnnnnnnnnnnnnnnnnnnnnnnnnnnnnnnnnnnnnnnnnnnnnnnnnnnnnnnnnnnnnnnnnnnnnnnnnnnnnnnnnnnnnnnnnnnnnnnnnnnnnnnnnnnnnnnnnnnnnnnnnnnnnnnnnnnnnnnnnnnnnnnnnnnnnnnnnnnnnnnnnnnnnnnnnnnnnnnnnnnnnnnnnnnnnnnnnnnnnnnnnnnnnnnnnnnnnnnnnnnnnnnnnnnnnnnnnnnnnnnnnnnnnnnnnnnnnnnnnnnnnnnnnnnnnnnnnnnnnnnnnnnnnnnnnnnnnnnnnnnnnnnnnnnnnnnnnnnnnnnnnnnnnnnnnnnnnnnnnnnnnnnnnnnnnnnnnnnnnnnnnnnnnnnnnnnnnnnnnnnnnnnnnnnnnnnnnnnnnnnnnnnnnnnnnnnnnnnnnnnnnnnnnnnnnnnnnnnnnnnnnnnnnnnnnnnnnnnnnnnnnnnnnnnnnnnnnnnnnnnnnnnnnnnnnnnnnnnnnnnnnnnnnnnnnnnnnnnnnnnnnnnnnnnnnnnnnnnnnnnnnnnnnnnnnnnnnnnnnnnnnnnnnnnnnnnnnnnnnnnnnnnnnnnnnnnnnnnnnnnnnnnnnnnnnnnnnnnnnnnnnnnnnnnnnnnnnnnnnnnnnnnnnnnnnnnnnnnnnnnnnnnnnnnnnnnnnnnnnnnnnnnnnnnnnnnnnnnnnnnnnnnnnnnnnnnnnnnnnnnnnnnnnnnnnnnnnnnnnnnnnnnnnnnnnnnnnnnnnnnnnnnnnnnnnnnnnnnnnnnnnnnnnnnnnnnnnnnnnnnnnnnnnnnnnnnnnnnnnnnnnnnnnnnnnnnnnnnnnnnnnnnnnnnnnnnnnnnnnnnnnnnnnnnnnnnnnnnnnnnnnnnnnnnnnnnnnnnnnnnnnnnnnnnnnnnnnnnnnnnnnnnnnnnnnnnnnnnnnnnnnnnnnnnnnnnnnnnnnnnnnnnnnnnnnnnnnnnnnnnnnnnnnnnnnnnnnnnnnnnnnnnnnnnnnnnnnnnnnnnnnnnnnnnnnnnnnnnnnnnnnnnnnnnnnnnnnnnnnnnnnnnnnnnnnnnnnnnnnnnnnnnnnnnnnnnnnnnnnnnnnnnnnnnnnnnnnnnnnnnnnnnnnnnnnnnnnnnnnnnnnnnnnnnnnnnnnnnnnnnnnnnnnnnnnnnnnnnnnnnnnnnnnnnnnnnnnnnnnnnnnnnnnnnnnnnnnnnnnnnnnnnnnnnnnnnnnnnnnnnnnnnnnnnnnnnnnnnnnnnnnnnnnnnnnnnnnnnnnnnnnnnnnnnnnnnnnnnnnnnnnnnnnnnnnnnnnnnnnnnnnnnnnnnnnnnnnnnnnnnnnnnnnnnnnnnnnnnnnnnnnnnnnnnnnnnnnnnnnnnnnnnnnnnnnnnnnnnnnnnnnnnnnnnnnnnnnnnnnnnnnnnnnnnnnnnnnnnnnnnnnnnnnnnnnnnnnnnnnnnnnnnnnnnnnnnnnnnnnnnnnnnnnnnnnnnnnnnnnnnnnnnnnnnnnnnnnnnnnnnnnnnnnnnnnnnnnnnnnnnnnnnnnnnnnnnnnnnnnnnnnnnnnnnnnnnnnnnnnnnnnnnnnnnnnnnnnnnnnnnnnnnnnnnnnnnnnnnnnnnnnnnnnnnnnnnnnnnnnnnnnnnnnnnnnnnnnnnnnnnnnnnnnnnnnnnnnnnnnnnnnnnnnnnnnnnnnnnnnnnnnnnnnnnnnnnnnnnnnnnnnnnnnnnnnnnnnnnnnnnnnnnnnnnnnnnnnnnnnnnnnnnnnnnnnnnnnnnnnnnnnnnnnnnnnnnnnnnnnnnnnnnnnnnnnnnnnnnnnnnnnnnnnnnnnnnnnnnnnnnnnnnnnnnnnnnnnnnnnnnnnnnnnnnnnnnnnnnnnnnnnnnnnnnnnnnnnnnnnnnnnnnnnnnnnnnnnnnnnnnnnnnnnnnnnnnnnnnnnnnnnnnnnnnnnnnnnnnnnnnnnnnnnnnnnnnnnnnnnnnnnnnnnnnnnnnnnnnnnnnnnnnnnnnnnnnnnnnnnnnnnnnnnnnnnnnnnnnnnnnnnnnnnnnnnnnnnnnnnnnnnnnnnnnnnnnnnnnnnnnnnnnnnnnnnnnnnnnnnnnnnnnnnnnnnnnnnnnnnnnnnnnnnnnnnnnnnnnnnnnnnnnnnnnnnnnnnnnnnnnnnnnnnnnnnnnnnnnnnnnnnnnnnnnnnnnnnnnnnnnnnnnnnnnnnnnnnnnnnnnnnnnnnnnnnnnnnnnnnnnnnnnnnnnnnnnnnnnnnnnnnnnnnnnnnnnnnnnnnnnnnnnnnnnnnnnnnnnnnnnnnnnnnnnnnnnnnnnnnnnnnnnnnnnnnnnnnnnnnnnnnnnnnnnnnnnnnnnnnnnnnnnnnnnnnnnnnnnnnnnnnnnnnnnnnnnnnnnnnnnnnnnnnnnnnnnnnnnnnnnnnnnnnnnnnnnnnnnnnnnnnnnnnnnnnnnnnnnnnnnnnnnnnnnnnnnnnnnnnnnnnnnnnnnnnnnnnnnnnnnnnnnnnnnnnnnnnnnnnnnnnnnnnnnnnnnnnnnnnnnnnnnnnnnnnnnnnnnnnnnnnnnnnnnnnnnnnnnnnnnnnnnnnnnnnnnnnnnnnnnnnnnnnnnnnnnnnnnnnnnnnnnnnnnnnnnnnnnnnnnnnnnnnnnnnnnnnnnnnnnnnnnnnnnnnnnnnnnnnnnnnnnnnnnnnnnnnnnnnnnnnnnnnnnnnnnnnnnnnnnnnnnnnnnnnnnnnnnnnnnnnnnnnnnnnnnnnnnnnnnnnnnnnnnnnnnnnnnnnnnnnnnnnnnnnnnnnnnnnnnnnnnnnnnnnnnnnnnnnnnnnnnnnnnnnnnnnnnnnnnnnnnnnnnnnnnnnnnnnnnnnnnnnnnnnnnnnnnnnnnnnnnnnnnnnnnnnnnnnnnnnnnnnnnnnnnnnnnnnnnnnnnnnnnnnnnnnnnnnnnnnnnnnnnnnnnnnnnnnnnnnnnnnnnnnnnnnnnnnnnnnnnnnnnnnnnnnnnnnnnnnnnnnnnnnnnnnnnnnnnnnnnnnnnnnnnnnnnnnnnnnnnnnnnnnnnnnnnnnnnnnnnnnnnnnnnnnnnnnnnnnnnnnnnnnnnnnnnnnnnnnnnnnnnnnnnnnnnnnnnnnnnnnnnnnnnnnnnnnnnnnnnnnnnnnnnnnnnnnnnnnnnnnnnnnnnnnnnnnnnnnnnnnnnnnnnnnnnnnnnnnnnnnnnnnnnnnnnnnnnnnnnnnnnnnnnnnnnnnnnnnnnnnnnnnnnnnnnnnnnnnnnnnnnnnnnnnnnnnnnnnnnnnnnnnnnnnnnnnnnnnnnnnnnnnnnnnnnnnnnnnnnnnnnnnnnnnnnnnnnnnnnnnnnnnnnnnnnnnnnnnnnnnnnnnnnnnnnnnnnnnnnnnnnnnnnnnnnnnnnnnnnnnnnnnnnnnnnnnnnnnnnnnnnnnnnnnnnnnnnnnnnnnnnnnnnnnnnnnnnnnnnnnnnnnnnnnnnnnnnnnnnnnnnnnnnnnnnnnnnnnnnnnnnnnnnnnnnnnnnnnnnnnnnnnnnnnnnnnnnnnnnnnnnnnnnnnnnnnnnnnnnnnnnnnnnnnnnnnnnnnnnnnnnnnnnnnnnnnnnnnnnnnnnnnnnnnnnnnnnnnnnnnnnnnnnnnnnnnnnnnnnnnnnnnnnnnnnnnnnnnnnnnnnnnnnnnnnnnnnnnnnnnnnnnnnnnnnnnnnnnnnnnnnnnnnnnnnnnnnnnnnnnnnnnnnnnnnnnnnnnnnnnnnnnnnnnnnnnnnnnnnnnnnnnnnnnnnnnnnnnnnnnnnnnnnnnnnnnnnnnnnnnnnnnnnnnnnnnnnnnnnnnnnnnnnnnnnnnnnnnnnnnnnnnnnnnnnnnnnnnnnnnnnnnnnnnnnnnnnnnnnnnnnnnnnnnnnnnnnnnnnnnnnnnnnnnnnnnnnnnnnnnnnnnnnnnnnnnnnnnnnnnnnnnnnnnnnnnnnnnnnnnnnnnnnnnnnnnnnnnnnnnnnnnnnnnnnnnnnnnnnnnnnnnnnnnnnnnnnnnnnnnnnnnnnnnnnnnnnnnnnnnnnnnnnnnnnnnnnnnnnnnnnnnnnnnnnnnnnnnnnnnnnnnnnnnnnnnnnnnnnnnnnnnnnnnnnnnnnnnnnnnnnnnnnnnnnnnnnnnnnnnnnnnnnnnnnnnnnnnnnnnnnnnnnnnnnnnnnnnnnnnnnnnnnnnnnnnnnnnnnnnnnnnnnnnnnnnnnnnnnnnnnnnnnnnnnnnnnnnnnnnnnnnnnnnnnnnnnnnnnnnnnnnnnnnnnnnnnnnnnnnnnnnnnnnnnnnnnnnnnnnnnnnnnnnnnnnnnnnnnnnnnnnnnnnnnnnnnnnnnnnnnnnnnnnnnnnnnnnnnnnnnnnnnnnnnnnnnnnnnnnnnnnnnnnnnnnnnnnnnnnnnnnnnnnnnnnnnnnnnnnnnnnnnnnnnnnnnnnnnnnnnnnnnnnnnnnnnnnnnnnnnnnnnnnnnnnnnnnnnnnnnnnnnnnnnnnnnnnnnnnnnnnnnnnnnnnnnnnnnnnnnnnnnnnnnnnnnnnnnnnnnnnnnnnnnnnnnnnnnnnnnnnnnnnnnnnnnnnnnnnnnnnnnnnnnnnnnnnnnnnnnnnnnnnnnnnnnnnnnnnnnnnnnnnnnnnnnnnnnnnnnnnnnnnnnnnnnnnnnnnnnnnnnnnnnnnnnnnnnnnnnnnnnnnnnnnnnnnnnnnnnnnnnnnnnnnnnnnnnnnnnnnnnnnnnnnnnnnnnnnnnnnnnnnnnnnnnnnnnnnnnnnnnnnnnnnnnnnnnnnnnnnnnnnnnnnnnnnnnnnnnnnnnnnnnnnnnnnnnnnnnnnnnnnnnnnnnnnnnnnnnnnnnnnnnnnnnnnnnnnnnnnnnnnnnnnnnnnnnnnnnnnnnnnnnnnnnnnnnnnnnnnnnnnnnnnnnnnnnnnnnnnnnnnnnnnnnnnnnnnnnnnnnnnnnnnnnnnnnnnnnnnnnnnnnnnnnnnnnnnnnnnnnnnnnnnnnnnnnnnnnnnnnnnnnnnnnnnnnnnnnnnnnnnnnnnnnnnnnnnnnnnnnnnnnnnnnnnnnnnnnnnnnnnnnnnnnnnnnnnnnnnnnnnnnnnnnnnnnnnnnnnnnnnnnnnnnnnnnnnnnnnnnnnnnnnnnnnnnnnnnnnnnnnnnnnnnnnnnnnnnnnnnnnnnnnnnnnnnnnnnnnnnnnnnnnnnnnnnnnnnnnnnnnnnnnnnnnnnnnnnnnnnnnnnnnnnnnnnnnnnnnnnnnnnnnnnnnnnnnnnnnnnnnnnnnnnnnnnnnnnnnnnnnnnnnnnnnnnnnnnnnnnnnnnnnnnnnnnnnnnnnnnnnnnnnnnnnnnnnnnnnnnnnnnnnnnnnnnnnnnnnnnnnnnnnnnnnnnnnnnnnnnnnnnnnnnnnnnnnnnnnnnnnnnnnnnnnnnnnnnnnnnnnnnnnnnnnnnnnnnnnnnnnnnnnnnnnnnnnnnnnnnnnnnnnnnnnnnnnnnnnnnnnnnnnnnnnnnnnnnnnnnnnnnnnnnnnnnnnnnnnnnnnnnnnnnnnnnnnnnnnnnnnnnnnnnnnnnnnnnnnnnnnnnnnnnnnnnnnnnnnnnnnnnnnnnnnnnnnnnnnnnnnnnnnnnnnnnnnnnnnnnnnnnnnnnnnnnnnnnnnnnnnnnnnnnnnnnnnnnnnnnnnnnnnnnnnnnnnnnnnnnnnnnnnnnnnnnnnnnnnnnnnnnnnnnnnnnnnnnnnnnnnnnnnnnnnnnnnnnnnnnnnnnnnnnnnnnnnnnnnnnnnnnnnnnnnnnnnnnnnnnnnnnnnnnnnnnnnnnnnnnnnnnnnnnnnnnnnnnnnnnnnnnnnnnnnnnnnnnnnnnnnnnnnnnnnnnnnnnnnnnnnnnnnnnnnnnnnnnnnnnnnnnnnnnnnnnnnnnnnnnnnnnnnnnnnnnnnnnnnnnnnnnnnnnnnnnnnnnnnnnnnnnnnnnnnnnnnnnnnnnnnnnnnnnnnnnnnnnnnnnnnnnnnnnnnnnnnnnnnnnnnnnnnnnnnnnnnnnnnnnnnnnnnnnnnnnnnnnnnnnnnnnnnnnnnnnnnnnnnnnnnnnnnnnnnnnnnnnnnnnnnnnnnnnnnnnnnnnnnnnnnnnnnnnnnnnnnnnnnnnnnnnnnnnnnnnnnnnnnnnnnnnnnnnnnnnnnnnnnnnnnnnnnnnnnnnnnnnnnnnnnnnnnnnnnnnnnnnnnnnnnnnnnnnnnnnnnnnnnnnnnnnnnnnnnnnnnnnnnnnnnnnnnnnnnnnnnnnnnnnnnnnnnnnnnnnnnnnnnnnnnnnnnnnnnnnnnnnnnnnnnnnnnnnnnnnnnnnnnnnnnnnnnnnnnnnnnnnnnnnnnnnnnnnnnnnnnnnnnnnnnnnnnnnnnnnnnnnnnnnnnnnnnnnnnnnnnnnnnnnnnnnnnnnnnnnnnnnnnnnnnnnnnnnnnnnnnnnnnnnnnnnnnnnnnnnnnnnnnnnnnnnnnnnnnnnnnnnnnnnnnnnnnnnnnnnnnnnnnnnnnnnnnnnnnnnnnnnnnnnnnnnnnnnnnnnnnnnnnnnnnnnnnnnnnnnnnnnnnnnnnnnnnnnnnnnnnnnnnnnnnnnnnnnnnnnnnnnnnnnnnnnnnnnnnnnnnnnnnnnnnnnnnnnnnnnnnnnnnnnnnnnnnnnnnnnnnnnnnnnnnnnnnnnnnnnnnnnnnnnnnnnnnnnnnnnnnnnnnnnnnnnnnnnnnnnnnnnnnnnnnnnnnnnnnnnnnnnnnnnnnnnnnnnnnnnnnnnnnnnnnnnnnnnnnnnnnnnnnnnnnnnnnnnnnnnnnnnnnnnnnnnnnnnnnnnnnnnnnnnnnnnnnnnnnnnnnnnnnnnnnnnnnnnnnnnnnnnnnnnnnnnnnnnnnnnnnnnnnnnnnnnnnnnnnnnnnnnnnnnnnnnnnnnnnnnnnnnnnnnnnnnnnnnnnnnnnnnnnnnnnnnnnnnnnnnnnnnnnnnnnnnnnnnnnnnnnnnnnnnnnnnnnnnnnnnnnnnnnnnnnnnnnnnnnnnnnnnnnnnnnnnnnnnnnnnnnnnnnnnnnnnnnnnnnnnnnnnnnnnnnnnnnnnnnnnnnnnnnnnnnnnnnnnnnnnnnnnnnnnnnnnnnnnnnnnnnnnnnnnnnnnnnnnnnnnnnnnnnnnnnnnnnnnnnnnnnnnnnnnnnnnnnnnnnnnnnnnnnnnnnnnnnnnnnnnnnnnnnnnnnnnnnnnnnnnnnnnnnnnnnnnnnnnnnnnnnnnnnnnnnnnnnnnnnnnnnnnnnnnnnnnnnnnnnnnnnnnnnnnnnnnnnnnnnnnnnnnnnnnnnnnnnnnnnnnnnnnnnnnnnnnnnnnnnnnnnnnnnnnnnnnnnnnnnnnnnnnnnnnnnnnnnnnnnnnnnnnnnnnnnnnnnnnnnnnnnnnnnnnnnnnnnnnnnnnnnnnnnnnnnnnnnnnnnnnnnnnnnnnnnnnnnnnnnnnnnnnnnnnnnnnnnnnnnnnnnnnnnnnnnnnnnnnnnnnnnnnnnnnnnnnnnnnnnnnnnnnnnnnnnnnnnnnnnnnnnnnnnnnnnnnnnnnnnnnnnnnnnnnnnnnnnnnnnnnnnnnnnnnnnnnnnnnnnnnnnnnnnnnnnnnnnnnnnnnnnnnnnnnnnnnnnnnnnnnnnnnnnnnnnnnnnnnnnnnnnnnnnnnnnnnnnnnnnnnnnnnnnnnnnnnnnnnnnnnnnnnnnnnnnnnnnnnnnnnnnnnnnnnnnnnnnnnnnnnnnnnnnnnnnnnnnnnnnnnnnnnnnnnnnnnnnnnnnnnnnnnnnnnnnnnnnnnnnnnnnnnnnnnnnnnnnnnnnnnnnnnnnnnnnnnnnnnnnnnnnnnnnnnnnnnnnnnnnnnnnnnnnnnnnnnnnnnnnnnnnnnnnnnnnnnnnnnnnnnnnnnnnnnnnnnnnnnnnnnnnnnnnnnnnnnnnnnnnnnnnnnnnnnnnnnnnnnnnnnnnnnnnnnnnnnnnnnnnnnnnnnnnnnnnnnnnnnnnnnnnnnnnnnnnnnnnnnnnnnnnnnnnnnnnnnnnnnnnnnnnnnnnnnnnnnnnnnnnnnnnnnnnnnnnnnnnnnnnnnnnnnnnnnnnnnnnnnnnnnnnnnnnnnnnnnnnnnnnnnnnnnnnnnnnnnnnnnnnnnnnnnnnnnnnnnnnnnnnnnnnnnnnnnnnnnnnnnnnnnnnnnnnnnnnnnnnnnnnnnnnnnnnnnnnnnnnnnnnnnnnnnnnnnnnnnnnnnnnnnnnnnnnnnnnnnnnnnnnnnnnnnnnnnnnnnnnnnnnnnnnnnnnnnnnnnnnnnnnnnnnnnnnnnnnnnnnnnnnnnnnnnnnnnnnnnnnnnnnnnnnnnnnnnnnnnnnnnnnnnnnnnnnnnnnnnnnnnnnnnnnnnnnnnnnnnnnnnnnnnnnnnnnnnnnnnnnnnnnnnnnnnnnnnnnnnnnnnnnnnnnnnnnnnnnnnnnnnnnnnnnnnnnnnnnnnnnnnnnnnnnnnnnnnnnnnnnnnnnnnnnnnnnnnnnnnnnnnnnnnnnnnnnnnnnnnnnnnnnnnnnnnnnnnnnnnnnnnnnnnnnnnnnnnnnnnnnnnnnnnnnnnnnnnnnnnnnnnnnnnnnnnnnnnnnnnnnnnnnnnnnnnnnnnnnnnnnnnnnnnnnnnnnnnnnnnnnnnnnnnnnnnnnnnnnnnnnnnnnnnnnnnnnnnnnnnnnnnnnnnnnnnnnnnnnnnnnnnnnnnnnnnnnnnnnnnnnnnnnnnnnnnnnnnnnnnnnnnnnnnnnnnnnnnnnnnnnnnnnnnnnnnnnnnnnnnnnnnnnnnnnnnnnnnnnnnnnnnnnnnnnnnnnnnnnnnnnnnnnnnnnnnnnnnnnnnnnnnnnnnnnnnnnnnnnnnnnnnnnnnnnnnnnnnnnnnnnnnnnnnnnnnnnnnnnnnnnnnnnnnnnnnnnnnnnnnnnnnnnnnnnnnnnnnnnnnnnnnnnnnnnnnnnnnnnnnnnnnnnnnnnnnnnnnnnnnnnnnnnnnnnnnnnnnnnnnnnnnnnnnnnnnnnnnnnnnnnnnnnnnnnnnnnnnnnnnnnnnnnnnnnnnnnnnnnnnnnnnnnnnnnnnnnnnnnnnnnnnnnnnnnnnnnnnnnnnnnnnnnnnnnnnnnnnnnnnnnnnnnnnnnnnnnnnnnnnnnnnnnnnnnnnnnnnnnnnnnnnnnnnnnnnnnnnnnnnnnnnnnnnnnnnnnnnnnnnnnnnnnnnnnnnnnnnnnnnnnnnnnnnnnnnnnnnnnnnnnnnnnnnnnnnnnnnnnnnnnnnnnnnnnnnnnnnnnnnnnnnnnnnnnnnnnnnnnnnnnnnnnnnnnnnnnnnnnnnnnnnnnnnnnnnnnnnnnnnnnnnnnnnnnnnnnnnnnnnnnnnnnnnnnnnnnnnnnnnnnnnnnnnnnnnnnnnnnnnnnnnnnnnnnnnnnnnnnnnnnnnnnnnnnnnnnnnnnnnnnnnnnnnnnnnnnnnnnnnnnnnnnnnnnnnnnnnnnnnnnnnnnnnnnnnnnnnnnnnnnnnnnnnnnnnnnnnnnnnnnnnnnnnnnnnnnnnnnnnnnnnnnnnnnnnnnnnnnnnnnnnnnnnnnnnnnnnnnnnnnnnnnnnnnnnnnnnnnnnnnnnnnnnnnnnnnnnnnnnnnnnnnnnnnnnnnnnnnnnnnnnnnnnnnnnnnnnnnnnnnnnnnnnnnnnnnnnnnnnnnnnnnnnnnnnnnnnnnnnnnnnnnnnnnnnnnnnnnnnnnnnnnnnnnnnnnnnnnnnnnnnnnnnnnnnnnnnnnnnnnnnnnnnnnnnnnnnnnnnnnnnnnnnnnnnnnnnnnnnnnnnnnnnnnnnnnnnnnnnnnnnnnnnnnnnnnnnnnnnnnnnnnnnnnnnnnnnnnnnnnnnnnnnnnnnnnnnnnnnnnnnnnnnnnnnnnnnnnnnnnnnnnnnnnnnnnnnnnnnnnnnnnnnnnnnnnnnnnnnnnnnnnnnnnnnnnnnnnnnnnnnnnnnnnnnnnnnnnnnnnnnnnnnnnnnnnnnnnnnnnnnnnnnnnnnnnnnnnnnnnnnnnnnnnnnnnnnnnnnnnnnnnnnnnnnnnnnnnnnnnnnnnnnnnnnnnnnnnnnnnnnnnnnnnnnnnnnnnnnnnnnnnnnnnnnnnnnnnnnnnnnnnnnnnnnnnnnnnnnnnnnnnnnnnnnnnnnnnnnnnnnnnnnnnnnnnnnnnnnnnnnnnnnnnnnnnnnnnnnnnnnnnnnnnnnnnnnnnnnnnnnnnnnnnnnnnnnnnnnnnnnnnnnnnnnnnnnnnnnnnnnnnnnnnnnnnnnnnnnnnnnnnnnnnnnnnnnnnnnnnnnnnnnnnnnnnnnnnnnnnnnnnnnnnnnnnnnnnnnnnnnnnnnnnnnnnnnnnnnnnnnnnnnnnnnnnnnnnnnnnnnnnnnnnnnnnnnnnnnnnnnnnnnnnnnnnnnnnnnnnnnnnnnnnnnnnnnnnnnnnnnnnnnnnnnnnnnnnnnnnnnnnnnnnnnnnnnnnnnnnnnnnnnnnnnnnnnnnnnnnnnnnnnnnnnnnnnnnnnnnnnnnnnnnnnnnnnnnnnnnnnnnnnnnnnnnnnnnnnnnnnnnnnnnnnnnnnnnnnnnnnnnnnnnnnnnnnnnnnnnnnnnnnnnnnnnnnnnnnnnnnnnnnnnnnnnnnnnnnnnnnnnnnnnnnnnnnnnnnnnnnnnnnnnnnnnnnnnnnnnnnnnnnnnnnnnnnnnnnnnnnnnnnnnnnnnnnnnnnnnnnnnnnnnnnnnnnnnnnnnnnnnnnnnnnnnnnnnnnnnnnnnnnnnnnnnnnnnnnnnnnnnnnnnnnnnnnnnnnnnnnnnnnnnnnnnnnnnnnnnnnnnnnnnnnnnnnnnnnnnnnnnnnnnnnnnnnnnnnnnnnnnnnnnnnnnnnnnnnnnnnnnnnnnnnnnnnnnnnnnnnnnnnnnnnnnnnnnnnnnnnnnnnnnnnnnnnnnnnnnnnnnnnnnnnnnnnnnnnnnnnnnnnnnnnnnnnnnnnnnnnnnnnnnnnnnnnnnnnnnnnnnnnnnnnnnnnnnnnnnnnnnnnnnnnnnnnnnnnnnnnnnnnnnnnnnnnnnnnnnnnnnnnnnnnnnnnnnnnnnnnnnnnnnnnnnnnnnnnnnnnnnnnnnnnnnnnnnnnnnnnnnnnnnnnnnnnnnnnnnnnnnnnnnnnnnnnnnnnnnnnnnnnnnnnnnnnnnnnnnnnnnnnnnnnnnnnnnnnnnnnnnnnnnnnnnnnnnnnnnnnnnnnnnnnnnnnnnnnnnnnnnnnnnnnnnnnnnnnnnnnnnnnnnnnnnnnnnnnnnnnnnnnnnnnnnnnnnnnnnnnnnnnnnnnnnnnnnnnnnnnnnnnnnnnnnnnnnnnnnnnnnnnnnnnnnnnnnnnnnnnnnnnnnnnnnnnnnnnnnnnnnnnnnnnnnnnnnnnnnnnnnnnnnnnnnnnnnnnnnnnnnnnnnnnnnnnnnnnnnnnnnnnnnnnnnnnnnnnnnnnnnnnnnnnnnnnnnnnnnnnnnnnnnnnnnnnnnnnnnnnnnnnnnnnnnnnnnnnnnnnnnnnnnnnnnnnnnnnnnnnnnnnnnnnnnnnnnnnnnnnnnnnnnnnnnnnnnnnnnnnnnnnnnnnnnnnnnnnnnnnnnnnnnnnnnnnnnnnnnnnnnnnnnnnnnnnnnnnnnnnnnnnnnnnnnnnnnnnnnnnnnnnnnnnnnnnnnnnnnnnnnnnnnnnnnnnnnnnnnnnnnnnnnnnnnnnnnnnnnnnnnnnnnnnnnnnnnnnnnnnnnnnnnnnnnnnnnnnnnnnnnnnnnnnnnnnnnnnnnnnnnnnnnnnnnnnnnnnnnnnnnnnnnnnnnnnnnnnnnnnnnnnnnnnnnnnnnnnnnnnnnnnnnnnnnnnnnnnnnnnnnnnnnnnnnnnnnnnnnnnnnnnnnnnnnnnnnnnnnnnnnnnnnnnnnnnnnnnnnnnnnnnnnnnnnnnnnnnnnnnnnnnnnnnnnnnnnnnnnnnnnnnnnnnnnnnnnnnnnnnnnnnnnnnnnnnnnnnnnnnnnnnnnnnnnnnnnnnnnnnnnnnnnnnnnnnnnnnnnnnnnnnnnnnnnnnnnnnnnnnnnnnnnnnnnnnnnnnnnnnnnnnnnnnnnnnnnnnnnnnnnnnnnnnnnnnnnnnnnnnnnnnnnnnnnnnnnnnnnnnnnnnnnnnnnnnnnnnnnnnnnnnnnnnnnnnnnnnnnnnnnnnnnnnnnnnnnnnnnnnnnnnnnnnnnnnnnnnnnnnnnnnnnnnnnnnnnnnnnnnnnnnnnnnnnnnnnnnnnnnnnnnnnnnnnnnnnnnnnnnnnnnnnnnnnnnnnnnnnnnnnnnnnnnnnnnnnnnnnnnnnnnnnnnnnnnnnnnnnnnnnnnnnnnnnnnnnnnnnnnnnnnnnnnnnnnnnnnnnnnnnnnnnnnnnnnnnnnnnnnnnnnnnnnnnnnnnnnnnnnnnnnnnnnnnnnnnnnnnnnnnnnnnnnnnnnnnnnnnnnnnnnnnnnnnnnnnnnnnnnnnnnnnnnnnnnnnnnnnnnnnnnnnnnnnnnnnnnnnnnnnnnnnnnnnnnnnnnnnnnnnnnnnnnnnnnnnnnnnnnnnnnnnnnnnnnnnnnnnnnnnnnnnnnnnnnnnnnnnnnnnnnnnnnnnnnnnnnnnnnnnnnnnnnnnnnnnnnnnnnnnnnnnnnnnnnnnnnnnnnnnnnnnnnnnnnnnnnnnnnnnnnnnnnnnnnnnnnnnnnnnnnnnnnnnnnnnnnnnnnnnnnnnnnnnnnnnnnnnnnnnnnnnnnnnnnnnnnnnnnnnnnnnnnnnnnnnnnnnnnnnnnnnnnnnnnnnnnnnnnnnnnnnnnnnnnnnnnnnnnnnnnnnnnnnnnnnnnnnnnnnnnnnnnnnnnnnnnnnnnnnnnnnnnnnnnnnnnnnnnnnnnnnnnnnnnnnnnnnnnnnnnnnnnnnnnnnnnnnnnnnnnnnnnnnnnnnnnnnnnnnnnnnnnnnnnnnnnnnnnnnnnnnnnnnnnnnnnnnnnnnnnnnnnnnnnnnnnnnnnnnnnnnnnnnnnnnnnnnnnnnnnnnnnnnnnnnnnnnnnnnnnnnnnnnnnnnnnnnnnnnnnnnnnnnnnnnnnnnnnnnnnnnnnnnnnnnnnnnnnnnnnnnnnnnnnnnnnnnnnnnnnnnnnnnnnnnnnnnnnnnnnnnnnnnnnnnnnnnnnnnnnnnnnnnnnnnnnnnnnnnnnnnnnnnnnnnnnnnnnnnnnnnnnnnnnnnnnnnnnnnnnnnnnnnnnnnnnnnnnnnnnnnnnnnnnnnnnnnnnnnnnnnnnnnnnnnnnnnnnnnnnnnnnnnnnnnnnnnnnnnnnnnnnnnnnnnnnnnnnnnnnnnnnnnnnnnnnnnnnnnnnnnnnnnnnnnnnnnnnnnnnnnnnnnnnnnnnnnnnnnnnnnnnnnnnnnnnnnnnnnnnnnnnnnnnnnnnnnnnnnnnnnnnnnnnnnnnnnnnnnnnnnnnnnnnnnnnnnnnnnnnnnnnnnnnnnnnnnnnnnnnnnnnnnnnnnnnnnnnnnnnnnnnnnnnnnnnnnnnnnnnnnnnnnnnnnnnnnnnnnnnnnnnnnnnnnnnnnnnnnnnnnnnnnnnnnnnnnnnnnnnnnnnnnnnnnnnnnnnnnnnnnnnnnnnnnnnnnnnnnnnnnnnnnnnnnnnnnnnnnnnnnnnnnnnnnnnnnnnnnnnnnnnnnnnnnnnnnnnnnnnnnnnnnnnnnnnnnnnnnnnnnnnnnnnnnnnnnnnnnnnnnnnnnnnnnnnnnnnnnnnnnnnnnnnnnnnnnnnnnnnnnnnnnnnnnnnnnnnnnnnnnnnnnnnnnnnnnnnnnnnnnnnnnnnnnnnnnnnnnnnnnnnnnnnnnnnnnnnnnnnnnnnnnnnnnnnnnnnnnnnnnnnnnnnnnnnnnnnnnnnnnnnnnnnnnnnnnnnnnnnnnnnnnnnnnnnnnnnnnnnnnnnnnnnnnnnnnnnnnnnnnnnnnnnnnnnnnnnnnnnnnnnnnnnnnnnnnnnnnnnnnnnnnnnnnnnnnnnnnnnnnnnnnnnnnnnnnnnnnnnnnnnnnnnnnnnnnnnnnnnnnnnnnnnnnnnnnnnnnnnnnnnnnnnnnnnnnnnnnnnnnnnnnnnnnnnnnnnnnnnnnnnnnnnnnnnnnnnnnnnnnnnnnnnnnnnnnnnnnnnnnnnnnnnnnnnnnnnnnnnnnnnnnnnnnnnnnnnnnnnnnnnnnnnnnnnnnnnnnnnnnnnnnnnnnnnnnnnnnnnnnnnnnnnnnnnnnnnnnnnnnnnnnnnnnnnnnnnnnnnnnnnnnnnnnnnnnnnnnnnnnnnnnnnnnnnnnnnnnnnnnnnnnnnnnnnnnnnnnnnnnnnnnnnnnnnnnnnnnnnnnnnnnnnnnnnnnnnnnnnnnnnnnnnnnnnnnnnnnnnnnnnnnnnnnnnnnnnnnnnnnnnnnnnnnnnnnnnnnnnnnnnnnnnnnnnnnnnnnnnnnnnnnnnnnnnnnnnnnnnnnnnnnnnnnnnnnnnnnnnnnnnnnnnnnnnnnnnnnnnnnnnnnnnnnnnnnnnnnnnnnnnnnnnnnnnnnnnnnnnnnnnnnnnnnnnnnnnnnnnnnnnnnnnnnnnnnnnnnnnnnnnnnnnnnnnnnnnnnnnnnnnnnnnnnnnnnnnnnnnnnnnnnnnnnnnnnnnnnnnnnnnnnnnnnnnnnnnnnnnnnnnnnnnnnnnnnnnnnnnnnnnnnnnnnnnnnnnnnnnnnnnnnnnnnnnnnnnnnnnnnnnnnnnnnnnnnnnnnnnnnnnnnnnnnnnnnnnnnnnnnnnnnnnnnnnnnnnnnnnnnnnnnnnnnnnnnnnnnnnnnnnnnnnnnnnnnnnnnnnnnnnnnnnnnnnnnnnnnnnnnnnnnnnnnnnnnnnnnnnnnnnnnnnnnnnnnnnnnnnnnnnnnnnnnnnnnnnnnnnnnnnnnnnnnnnnnnnnnnnnnnnnnnnnnnnnnnnnnnnnnnnnnnnnnnnnnnnnnnnnnnnnnnnnnnnnnnnnnnnnnnnnnnnnnnnnnnnnnnnnnnnnnnnnnnnnnnnnnnnnnnnnnnnnnnnnnnnnnnnnnnnnnnnnnnnnnnnnnnnnnnnnnnnnnnnnnnnnnnnnnnnnnnnnnnnnnnnnnnnnnnnnnnnnnnnnnnnnnnnnnnnnnnnnnnnnnnnnnnnnnnnnnnnnnnnnnnnnnnnnnnnnnnnnnnnnnnnnnnnnnnnnnnnnnnnnnnnnnnnnnnnnnnnnnnnnnnnnnnnnnnnnnnnnnnnnnnnnnnnnnnnnnnnnnnnnnnnnnnnnnnnnnnnnnnnnnnnnnnnnnnnnnnnnnnnnnnnnnnnnnnnnnnnnnnnnnnnnnnnnnnnnnnnnnnnnnnnnnnnnnnnnnnnnnnnnnnnnnnnnnnnnnnnnnnnnnnnnnnnnnnnnnnnnnnnnnnnnnnnnnnnnnnnnnnnnnnnnnnnnnnnnnnnnnnnnnnnnnnnnnnnnnnnnnnnnnnnnnnnnnnnnnnnnnnnnnnnnnnnnnnnnnnnnnnnnnnnnnnnnnnnnnnnnnnnnnnnnnnnnnnnnnnnnnnnnnnnnnnnnnnnnnnnnnnnnnnnnnnnnnnnnnnnnnnnnnnnnnnnnnnnnnnnnnnnnnnnnnnnnnnnnnnnnnnnnnnnnnnnnnnnnnnnnnnnnnnnnnnnnnnnnnnnnnnnnnnnnnnnnnnnnnnnnnnnnnnnnnnnnnnnnnnnnnnnnnnnnnnnnnnnnnnnnnnnnnnnnnnnnnnnnnnnnnnnnnnnnnnnnnnnnnnnnnnnnnnnnnnnnnnnnnnnnnnnnnnnnnnnnnnnnnnnnnnnnnnnnnnnnnnnnnnnnnnnnnnnnnnnnnnnnnnnnnnnnnnnnnnnnnnnnnnnnnnnnnnnnnnnnnnnnnnnnnnnnnnnnnnnnnnnnnnnnnnnnnnnnnnnnnnnnnnnnnnnnnnnnnnnnnnnnnnnnnnnnnnnnnnnnnnnnnnnnnnnnnnnnnnnnnnnnnnnnnnnnnnnnnnnnnnnnnnnnnnnnnnnnnnnnnnnnnnnnnnnnnnnnnnnnnnnnnnnnnnnnnnnnnnnnnnnnnnnnnnnnnnnnnnnnnnnnnnnnnnnnnnnnnnnnnnnnnnnnnnnnnnnnnnnnnnnnnnnnnnnnnnnnnnnnnnnnnnnnnnnnnnnnnnnnnnnnnnnnnnnnnnnnnnnnnnnnnnnnnnnnnnnnnnnnnnnnnnnnnnnnnnnnnnnnnnnnnnnnnnnnnnnnnnnnnnnnnnnnnnnnnnnnnnnnnnnnnnnnnnnnnnnnnnnnnnnnnnnnnnnnnnnnnnnnnnnnnnnnnnnnnnnnnnnnnnnnnnnnnnnnnnnnnnnnnnnnnnnnnnnnnnnnnnnnnnnnnnnnnnnnnnnnnnnnnnnnnnnnnnnnnnnnnnnnnnnnnnnnnnnnnnnnnnnnnnnnnnnnnnnnnnnnnnnnnnnnnnnnnnnnnnnnnnnnnnnnnnnnnnnnnnnnnnnnnnnnnnnnnnnnnnnnnnnnnnnnnnnnnnnnnnnnnnnnnnnnnnnnnnnnnnnnnnnnnnnnnnnnnnnnnnnnnnnnnnnnnnnnnnnnnnnnnnnnnnnnnnnnnnnnnnnnnnnnnnnnnnnnnnnnnnnnnnnnnnnnnnnnnnnnnnnnnnnnnnnnnnnnnnnnnnnnnnnnnnnnnnnnnnnnnnnnnnnnnnnnnnnnnnnnnnnnnnnnnnnnnnnnnnnnnnnnnnnnnnnnnnnnnnnnnnnnnnnnnnnnnnnnnnnnnnnnnnnnnnnnnnnnnnnnnnnnnnnnnnnnnnnnnnnnnnnnnnnnnnnnnnnnnnnnnnnnnnnnnnnnnnnnnnnnnnnnnnnnnnnnnnnnnnnnnnnnnnnnnnnnnnnnnnnnnnnnnnnnnnnnnnnnnnnnnnnnnnnnnnnnnnnnnnnnnnnnnnnnnnnnnnnnnnnnnnnnnnnnnnnnnnnnnnnnnnnnnnnnnnnnnnnnnnnnnnnnnnnnnnnnnnnnnnnnnnnnnnnnnnnnnnnnnnnnnnnnnnnnnnnnnnnnnnnnnnnnnnnnnnnnnnnnnnnnnnnnnnnnnnnnnnnnnnnnnnnnnnnnnnnnnnnnnnnnnnnnnnnnnnnnnnnnnnnnnnnnnnnnnnnnnnnnnnnnnnnnnnnnnnnnnnnnnnnnnnnnnnnnnnnnnnnnnnnnnnnnnnnnnnnnnnnnnnnnnnnnnnnnnnnnnnnnnnnnnnnnnnnnnnnnnnnnnnnnnnnnnnnnnnnnnnnnnnnnnnnnnnnnnnnnnnnnnnnnnnnnnnnnnnnnnnnnnnnnnnnnnnnnnnnnnnnnnnnnnnnnnnnnnnnnnnnnnnnnnnnnnnnnnnnnnnnnnnnnnnnnnnnnnnnnnnnnnnnnnnnnnnnnnnnnnnnnnnnnnnnnnnnnnnnnnnnnnnnnnnnnnnnnnnnnnnnnnnnnnnnnnnnnnnnnnnnnnnnnnnnnnnnnnnnnnnnnnnnnnnnnnnnnnnnnnnnnnnnnnnnnnnnnnnnnnnnnnnnnnnnnnnnnnnnnnnnnnnnnnnnnnnnnnnnnnnnnnnnnnnnnnnnnnnnnnnnnnnnnnnnnnnnnnnnnnnnnnnnnnnnnnnnnnnnnnnnnnnnnnnnnnnnnnnnnnnnnnnnnnnnnnnnnnnnnnnnnnnnnnnnnnnnnnnnnnnnnnnnnnnnnnnnnnnnnnnnnnnnnnnnnnnnnnnnnnnnnnnnnnnnnnnnnnnnnnnnnnnnnnnnnnnnnnnnnnnnnnnnnnnnnnnnnnnnnnnnnnnnnnnnnnnnnnnnnnnnnnnnnnnnnnnnnnnnnnnnnnnnnnnnnnnnnnnnnnnnnnnnnnnnnnnnnnnnnnnnnnnnnnnnnnnnnnnnnnnnnnnnnnnnnnnnnnnnnnnnnnnnnnnnnnnnnnnnnnnnnnnnnnnnnnnnnnnnnnnnnnnnnnnnnnnnnnnnnnnnnnnnnnnnnnnnnnnnnnnnnnnnnnnnnnnnnnnnnnnnnnnnnnnnnnnnnnnnnnnnnnnnnnnnnnnnnnnnnnnnnnnnnnnnnnnnnnnnnnnnnnnnnnnnnnnnnnnnnnnnnnnnnnnnnnnnnnnnnnnnnnnnnnnnnnnnnnnnnnnnnnnnnnnnnnnnnnnnnnnnnnnnnnnnnnnnnnnnnnnnnnnnnnnnnnnnnnnnnnnnnnnnnnnnnnnnnnnnnnnnnnnnnnnnnnnnnnnnnnnnnnnnnnnnnnnnnnnnnnnnnnnnnnnnnnnnnnnnnnnnnnnnnnnnnnnnnnnnnnnnnnnnnnnnnnnnnnnnnnnnnnnnnnnnnnnnnnnnnnnnnnnnnnnnnnnnnnnnnnnnnnnnnnnnnnnnnnnnnnnnnnnnnnnnnnnnnnnnnnnnnnnnnnnnnnnnnnnnnnnnnnnnnnnnnnnnnnnnnnnnnnnnnnnnnnnnnnnnnnnnnnnnnnnnnnnnnnnnnnnnnnnnnnnnnnnnnnnnnnnnnnnnnnnnnnnnnnnnnnnnnnnnnnnnnnnnnnnnnnnnnnnnnnnnnnnnnnnnnnnnnnnnnnnnnnnnnnnnnnnnnnnnnnnnnnnnnnnnnnnnnnnnnnnnnnnnnnnnnnnnnnnnnnnnnnnnnnnnnnnnnnnnnnnnnnnnnnnnnnnnnnnnnnnnnnnnnnnnnnnnnnnnnnnnnnnnnnnnnnnnnnnnnnnnnnnnnnnnnnnnnnnnnnnnnnnnnnnnnnnnnnnnnnnnnnnnnnnnnnnnnnnnnnnnnnnnnnnnnnnnnnnnnnnnnnnnnnnnnnnnnnnnnnnnnnnnnnnnnnnnnnnnnnnnnnnnnnnnnnnnnnnnnnnnnnnnnnnnnnnnnnnnnnnnnnnnnnnnnnnnnnnnnnnnnnnnnnnnnnnnnnnnnnnnnnnnnnnnnnnnnnnnnnnnnnnnnnnnnnnnnnnnnnnnnnnnnnnnnnnnnnnnnnnnnnnnnnnnnnnnnnnnnnnnnnnnnnnnnnnnnnnnnnnnnnnnnnnnnnnnnnnnnnnnnnnnnnnnnnnnnnnnnnnnnnnnnnnnnnnnnnnnnnnnnnnnnnnnnnnnnnnnnnnnnnnnnnnnnnnnnnnnnnnnnnnnnnnnnnnnnnnnnnnnnnnnnnnnnnnnnnnnnnnnnnnnnnnnnnnnnnnnnnnnnnnnnnnnnnnnnnnnnnnnnnnnnnnnnnnnnnnnnnnnnnnnnnnnnnnnnnnnnnnnnnnnnnnnnnnnnnnnnnnnnnnnnnnnnnnnnnnnnnnnnnnnnnnnnnnnnnnnnnnnnnnnnnnnnnnnnnnnnnnnnnnnnnnnnnnnnnnnnnnnnnnnnnnnnnnnnnnnnnnnnnnnnnnnnnnnnnnnnnnnnnnnnnnnnnnnnnnnnnnnnnnnnnnnnnnnnnnnnnnnnnnnnnnnnnnnnnnnnnnnnnnnnnnnnnnnnnnnnnnnnnnnnnnnnnnnnnnnnnnnnnnnnnnnnnnnnnnnnnnnnnnnnnnnnnnnnnnnnnnnnnnnnnnnnnnnnnnnnnnnnnnnnnnnnnnnnnnnnnnnnnnnnnnnnnnnnnnnnnnnnnnnnnnnnnnnnnnnnnnnnnnnnnnnnnnnnnnnnnnnnnnnnnnnnnnnnnnnnnnnnnnnnnnnnnnnnnnnnnnnnnnnnnnnnnnnnnnnnnnnnnnnnnnnnnnnnnnnnnnnnnnnnnnnnnnnnnnnnnnnnnnnnnnnnnnnnnnnnnnnnnnnnnnnnnnnnnnnnnnnnnnnnnnnnnnnnnnnnnnnnnnnnnnnnnnnnnnnnnnnnnnnnnnnnnnnnnnnnnnnnnnnnnnnnnnnnnnnnnnnnnnnnnnnnnnnnnnnnnnnnnnnnnnnnnnnnnnnnnnnnnnnnnnnnnnnnnnnnnnnnnnnnnnnnnnnnnnnnnnnnnnnnnnnnnnnnnnnnnnnnnnnnnnnnnnnnnnnnnnnnnnnnnnnnnnnnnnnnnnnnnnnnnnnnnnnnnnnnnnnnnnnnnnnnnnnnnnnnnnnnnnnnnnnnnnnnnnnnnnnnnnnnnnnnnnnnnnnnnnnnnnnnnnnnnnnnnnnnnnnnnnnnnnnnnnnnnnnnnnnnnnnnnnnnnnnnnnnnnnnnnnnnnnnnnnnnnnnnnnnnnnnnnnnnnnnnnnnnnnnnnnnnnnnnnnnnnnnnnnnnnnnnnnnnnnnnnnnnnnnnnnnnnnnnnnnnnnnnnnnnnnnnnnnnnnnnnnnnnnnnnnnnnnnnnnnnnnnnnnnnnnnnnnnnnnnnnnnnnnnnnnnnnnnnnnnnnnnnnnnnnnnnnnnnnnnnnnnnnnnnnnnnnnnnnnnnnnnnnnnnnnnnnnnnnnnnnnnnnnnnnnnnnnnnnnnnnnnnnnnnnnnnnnnnnnnnnnnnnnnnnnnnnnnnnnnnnnnnnnnnnnnnnnnnnnnnnnnnnnnnnnnnnnnnnnnnnnnnnnnnnnnnnnnnnnnnnnnnnnnnnnnnnnnnnnnnnnnnnnnnnnnnnnnnnnnnnnnnnnnnnnnnnnnnnnnnnnnnnnnnnnnnnnnnnnnnnnnnnnnnnnnnnnnnnnnnnnnnnnnnnnnnnnnnnnnnnnnnnnnnnnnnnnnnnnnnnnnnnnnnnnnnnnnnnnnnnnnnnnnnnnnnnnnnnnnnnnnnnnnnnnnnnnnnnnnnnnnnnnnnnnnnnnnnnnnnnnnnnnnnnnnnnnnnnnnnnnnnnnnnnnnnnnnnnnnnnnnnnnnnnnnnnnnnnnnnnnnnnnnnnnnnnnnnnnnnnnnnnnnnnnnnnnnnnnnnnnnnnnnnnnnnnnnnnnnnnnnnnnnnnnnnnnnnnnnnnnnnnnnnnnnnnnnnnnnnnnnnnnnnnnnnnnnnnnnnnnnnnnnnnnnnnnnnnnnnnnnnnnnnnnnnnnnnnnnnnnnnnnnnnnnnnnnnnnnnnnnnnnnnnnnnnnnnnnnnnnnnnnnnnnnnnnnnnnnnnnnnnnnnnnnnnnnnnnnnnnnnnnnnnnnnnnnnnnnnnnnnnnnnnnnnnnnnnnnnnnnnnnnnnnnnnnnnnnnnnnnnnnnnnnnnnnnnnnnnnnnnnnnnnnnnnnnnnnnnnnnnnnnnnnnnnnnnnnnnnnnnnnnnnnnnnnnnnnnnnnnnnnnnnnnnnnnnnnnnnnnnnnnnnnnnnnnnnnnnnnnnnnnnnnnnnnnnnnnnnnnnnnnnnnnnnnnnnnnnnnnnnnnnnnnnnnnnnnnnnnnnnnnnnnnnnnnnnnnnnnnnnnnnnnnnnnnnnnnnnnnnnnnnnnnnnnnnnnnnnnnnnnnnnnnnnnnnnnnnnnnnnnnnnnnnnnnnnnnnnnnnnnnnnnnnnnnnnnnnnnnnnnnnnnnnnnnnnnnnnnnnnnnnnnnnnnnnnnnnnnnnnnnnnnnnnnnnnnnnnnnnnnnnnnnnnnnnnnnnnnnnnnnnnnnnnnnnnnnnnnnnnnnnnnnnnnnnnnnnnnnnnnnnnnnnnnnnnnnnnnnnnnnnnnnnnnnnnnnnnnnnnnnnnnnnnnnnnnnnnnnnnnnnnnnnnnnnnnnnnnnnnnnnnnnnnnnnnnnnnnnnnnnnnnnnnnnnnnnnnnnnnnnnnnnnnnnnnnnnnnnnnnnnnnnnnnnnnnnnnnnnnnnnnnnnnnnnnnnnnnnnnnnnnnnnnnnnnnnnnnnnnnnnnnnnnnnnnnnnnnnnnnnnnnnnnnnnnnnnnnnnnnnnnnnnnnnnnnnnnnnnnnnnnnnnnnnnnnnnnnnnnnnnnnnnnnnnnnnnnnnnnnnnnnnnnnnnnnnnnnnnnnnnnnnnnnnnnnnnnnnnnnnnnnnnnnnnnnnnnnnnnnnnnnnnnnnnnnnnnnnnnnnnnnnnnnnnnnnnnnnnnnnnnnnnnnnnnnnnnnnnnnnnnnnnnnnnnnnnnnnnnnnnnnnnnnnnnnnnnnnnnnnnnnnnnnnnnnnnnnnnnnnnnnnnnnnnnnnnnnnnnnnnnnnnnnnnnnnnnnnnnnnnnnnnnnnnnnnnnnnnnnnnnnnnnnnnnnnnnnnnnnnnnnnnnnnnnnnnnnnnnnnnnnnnnnnnnnnnnnnnnnnnnnnnnnnnnnnnnnnnnnnnnnnnnnnnnnnnnnnnnnnnnnnnnnnnnnnnnnnnnnnnnnnnnnnnnnnnnnnnnnnnnnnnnnnnnnnnnnnnnnnnnnnnnnnnnnnnnnnnnnnnnnnnnnnnnnnnnnnnnnnnnnnnnnnnnnnnnnnnnnnnnnnnnnnnnnnnnnnnnnnnnnnnnnnnnnnnnnnnnnnnnnnnnnnnnnnnnnnnnnnnnnnnnnnnnnnnnnnnnnnnnnnnnnnnnnnnnnnnnnnnnnnnnnnnnnnnnnnnnnnnnnnnnnnnnnnnnnnnnnnnnnnnnnnnnnnnnnnnnnnnnnnnnnnnnnnnnnnnnnnnnnnnnnnnnnnnnnnnnnnnnnnnnnnnnnnnnnnnnnnnnnnnnnnnnnnnnnnnnnnnnnnnnnnnnnnnnnnnnnnnnnnnnnnnnnnnnnnnnnnnnnnnnnnnnnnnnnnnnnnnnnnnnnnnnnnnnnnnnnnnnnnnnnnnnnnnnnnnnnnnnnnnnnnnnnnnnnnnnnnnnnnnnnnnnnnnnnnnnnnnnnnnnnnnnnnnnnnnnnnnnnnnnnnnnnnnnnnnnnnnnnnnnnnnnnnnnnnnnnnnnnnnnnnnnnnnnnnnnnnnnnnnnnnnnnnnnnnnnnnnnnnnnnnnnnnnnnnnnnnnnnnnnnnnnnnnnnnnnnnnnnnnnnnnnnnnnnnnnnnnnnnnnnnnnnnnnnnnnnnnnnnnnnnnnnnnnnnnnnnnnnnnnnnnnnnnnnnnnnnnnnnnnnnnnnnnnnnnnnnnnnnnnnnnnnnnnnnnnnnnnnnnnnnnnnnnnnnnnnnnnnnnnnnnnnnnnnnnnnnnnnnnnnnnnnnnnnnnnnnnnnnnnnnnnnnnnnnnnnnnnnnnnnnnnnnnnnnnnnnnnnnnnnnnnnnnnnnnnnnnnnnnnnnnnnnnnnnnnnnnnnnnnnnnnnnnnnnnnnnnnnnnnnnnnnnnnnnnnnnnnnnnnnnnnnnnnnnnnnnnnnnnnnnnnnnnnnnnnnnnnnnnnnnnnnnnnnnnnnnnnnnnnnnnnnnnnnnnnnnnnnnnnnnnnnnnnnnnnnnnnnnnnnnnnnnnnnnnnnnnnnnnnnnnnnnnnnnnnnnnnnnnnnnnnnnnnnnnnnnnnnnnnnnnnnnnnnnnnnnnnnnnnnnnnnnnnnnnnnnnnnnnnnnnnnnnnnnnnnnnnnnnnnnnnnnnnnnnnnnnnnnnnnnnnnnnnnnnnnnnnnnnnnnnnnnnnnnnnnnnnnnnnnnnnnnnnnnnnnnnnnnnnnnnnnnnnnnnnnnnnnnnnnnnnnnnnnnnnnnnnnnnnnnnnnnnnnnnnnnnnnnnnnnnnnnnnnnnnnnnnnnnnnnnnnnnnnnnnnnnnnnnnnnnnnnnnnnnnnnnnnnnnnnnnnnnnnnnnnnnnnnnnnnnnnnnnnnnnnnnnnnnnnnnnnnnnnnnnnnnnnnnnnnnnnnnnnnnnnnnnnnnnnnnnnnnnnnnnnnnnnnnnnnnnnnnnnnnnnnnnnnnnnnnnnnnnnnnnnnnnnnnnnnnnnnnnnnnnnnnnnnnnnnnnnnnnnnnnnnnnnnnnnnnnnnnnnnnnnnnnnnnnnnnnnnnnnnnnnnnnnnnnnnnnnnnnnnnnnnnnnnnnnnnnnnnnnnnnnnnnnnnnnnnnnnnnnnnnnnnnnnnnnnnnnnnnnnnnnnnnnnnnnnnnnnnnnnnnnnnnnnnnnnnnnnnnnnnnnnnnnnnnnnnnnnnnnnnnnnnnnnnnnnnnnnnnnnnnnnnnnnnnnnnnnnnnnnnnnnnnnnnnnnnnnnnnnnnnnnnnnnnnnnnnnnnnnnnnnnnnnnnnnnnnnnnnnnnnnnnnnnnnnnnnnnnnnnnnnnnnnnnnnnnnnnnnnnnnnnnnnnnnnnnnnnnnnnnnnnnnnnnnnnnnnnnnnnnnnnnnnnnnnnnnnnnnnnnnnnnnnnnnnnnnnnnnnnnnnnnnnnnnnnnnnnnnnnnnnnnnnnnnnnnnnnnnnnnnnnnnnnnnnnnnnnnnnnnnnnnnnnnnnnnnnnnnnnnnnnnnnnnnnnnnnnnnnnnnnnnnnnnnnnnnnnnnnnnnnnnnnnnnnnnnnnnnnnnnnnnnnnnnnnnnnnnnnnnnnnnnnnnnnnnnnnnnnnnnnnnnnnnnnnnnnnnnnnnnnnnnnnnnnnnnnnnnnnnnnnnnnnnnnnnnnnnnnnnnnnnnnnnnnnnnnnnnnnnnnnnnnnnnnnnnnnnnnnnnnnnnnnnnnnnnnnnnnnnnnnnnnnnnnnnnnnnnnnnnnnnnnnnnnnnnnnnnnnnnnnnnnnnnnnnnnnnnnnnnnnnnnnnnnnnnnnnnnnnnnnnnnnnnnnnnnnnnnnnnnnnnnnnnnnnnnnnnnnnnnnnnnnnnnnnnnnnnnnnnnnnnnnnnnnnnnnnnnnnnnnnnnnnnnnnnnnnnnnnnnnnnnnnnnnnnnnnnnnnnnnnnnnnnnnnnnnnnnnnnnnnnnnnnnnnnnnnnnnnnnnnnnnnnnnnnnnnnnnnnnnnnnnnnnnnnnnnnnnnnnnnnnnnnnnnnnnnnnnnnnnnnnnnnnnnnnnnnnnnnnnnnnnnnnnnnnnnnnnnnnnnnnnnnnnnnnnnnnnnnnnnnnnnnnnnnnnnnnnnnnnnnnnnnnnnnnnnnnnnnnnnnnnnnnnnnnnnnnnnnnnnnnnnnnnnnnnnnnnnnnnnnnnnnnnnnnnnnnnnnnnnnnnnnnnnnnnnnnnnnnnnnnnnnnnnnnnnnnnnnnnnnnnnnnnnnnnnnnnnnnnnnnnnnnnnnnnnnnnnnnnnnnnnnnnnnnnnnnnnnnnnnnnnnnnnnnnnnnnnnnnnnnnnnnnnnnnnnnnnnnnnnnnnnnnnnnnnnnnnnnnnnnnnnnnnnnnnnnnnnnnnnnnnnnnnnnnnnnnnnnnnnnnnnnnnnnnnnnnnnnnnnnnnnnnnnnnnnnnnnnnnnnnnnnnnnnnnnnnnnnnnnnnnnnnnnnnnnnnnnnnnnnnnnnnnnnnnnnnnnnnnnnnnnnnnnnnnnnnnnnnnnnnnnnnnnnnnnnnnnnnnnnnnnnnnnnnnnnnnnnnnnnnnnnnnnnnnnnnnnnnnnnnnnnnnnnnnnnnnnnnnnnnnnnnnnnnnnnnnnnnnnnnnnnnnnnnnnnnnnnnnnnnnnnnnnnnnnnnnnnnnnnnnnnnnnnnnnnnnnnnnnnnnnnnnnnnnnnnnnnnnnnnnnnnnnnnnnnnnnnnnnnnnnnnnnnnnnnnnnnnnnnnnnnnnnnnnnnnnnnnnnnnnnnnnnnnnnnnnnnnnnnnnnnnnnnnnnnnnnnnnnnnnnnnnnnnnnnnnnnnnnnnnnnnnnnnnnnnnnnnnnnnnnnnnnnnnnnnnnnnnnnnnnnnnnnnnnnnnnnnnnnnnnnnnnnnnnnnnnnnnnnnnnnnnnnnnnnnnnnnnnnnnnnnnnnnnnnnnnnnnnnnnnnnnnnnnnnnnnnnnnnnnnnnnnnnnnnnnnnnnnnnnnnnnnnnnnnnnnnnnnnnnnnnnnnnnnnnnnnnnnnnnnnnnnnnnnnnnnnnnnnnnnnnnnnnnnnnnnnnnnnnnnnnnnnnnnnnnnnnnnnnnnnnnnnnnnnnnnnnnnnnnnnnnnnnnnnnnnnnnnnnnnnnnnnnnnnnnnnnnnnnnnnnnnnnnnnnnnnnnnnnnnnnnnnnnnnnnnnnnnnnnnnnnnnnnnnnnnnnnnnnnnnnnnnnnnnnnnnnnnnnnnnnnnnnnnnnnnnnnnnnnnnnnnnnnnnnnnnnnnnnnnnnnnnnnnnnnnnnnnnnnnnnnnnnnnnnnnnnnnnnnnnnnnnnnnnnnnnnnnnnnnnnnnnnnnnnnnnnnnnnnnnnnnnnnnnnnnnnnnnnnnnnnnnnnnnnnnnnnnnnnnnnnnnnnnnnnnnnnnnnnnnnnnnnnnnnnnnnnnnnnnnnnnnnnnnnnnnnnnnnnnnnnnnnnnnnnnnnnnnnnnnnnnnnnnnnnnnnnnnnnnnnnnnnnnnnnnnnnnnnnnnnnnnnnnnnnnnnnnnnnnnnnnnnnnnnnnnnnnnnnnnnnnnnnnnnnnnnnnnnnnnnnnnnnnnnnnnnnnnnnnnnnnnnnnnnnnnnnnnnnnnnnnnnnnnnnnnnnnnnnnnnnnnnnnnnnnnnnnnnnnnnnnnnnnnnnnnnnnnnnnnnnnnnnnnnnnnnnnnnnnnnnnnnnnnnnnnnnnnnnnnnnnnnnnnnnnnnnnnnnnnnnnnnnnnnnnnnnnnnnnnnnnnnnnnnnnnnnnnnnnnnnnnnnnnnnnnnnnnnnnnnnnnnnnnnnnnnnnnnnnnnnnnnnnnnnnnnnnnnnnnnnnnnnnnnnnnnnnnnnnnnnnnnnnnnnnnnnnnnnnnnnnnnnnnnnnnnnnnnnnnnnnnnnnnnnnnnnnnnnnnnnnnnnnnnnnnnnnnnnnnnnnnnnnnnnnnnnnnnnnnnnnnnnnnnnnnnnnnnnnnnnnnnnnnnnnnnnnnnnnnnnnnnnnnnnnnnnnnnnnnnnnnnnnnnnnnnnnnnnnnnnnnnnnnnnnnnnnnnnnnnnnnnnnnnnnnnnnnnnnnnnnnnnnnnnnnnnnnnnnnnnnnnnnnnnnnnnnnnnnnnnnnnnnnnnnnnnnnnnnnnnnnnnnnnnnnnnnnnnnnnnnnnnnnnnnnnnnnnnnnnnnnnnnnnnnnnnnnnnnnnnnnnnnnnnnnnnnnnnnnnnnnnnnnnnnnnnnnnnnnnnnnnnnnnnnnnnnnnnnnnnnnnnnnnnnnnnnnnnnnnnnnnnnnnnnnnnnnnnnnnnnnnnnnnnnnnnnnnnnnnnnnnnnnnnnnnnnnnnnnnnnnnnnnnnnnnnnnnnnnnnnnnnnnnnnnnnnnnnnnnnnnnnnnnnnnnnnnnnnnnnnnnnnnnnnnnnnnnnnnnnnnnnnnnnnnnnnnnnnnnnnnnnnnnnnnnnnnnnnnnnnnnnnnnnnnnnnnnnnnnnnnnnnnnnnnnnnnnnnnnnnnnnnnnnnnnnnnnnnnnnnnnnnnnnnnnnnnnnnnnnnnnnnnnnnnnnnnnnnnnnnnnnnnnnnnnnnnnnnnnnnnnnnnnnnnnnnnnnnnnnnnnnnnnnnnnnnnnnnnnnnnnnnnnnnnnnnnnnnnnnnnnnnnnnnnnnnnnnnnnnnnnnnnnnnnnnnnnnnnnnnnnnnnnnnnnnnnnnnnnnnnnnnnnnnnnnnnnnnnnnnnnnnnnnnnnnnnnnnnnnnnnnnnnnnnnnnnnnnnnnnnnnnnnnnnnnnnnnnnnnnnnnnnnnnnnnnnnnnnnnnnnnnnnnnnnnnnnnnnnnnnnnnnnnnnnnnnnnnnnnnnnnnnnnnnnnnnnnnnnnnnnnnnnnnnnnnnnnnnnnnnnnnnnnnnnnnnnnnnnnnnnnnnnnnnnnnnnnnnnnnnnnnnnnnnnnnnnnnnnnnnnnnnnnnnnnnnnnnnnnnnnnnnnnnnnnnnnnnnnnnnnnnnnnnnnnnnnnnnnnnnnnnnnnnnnnnnnnnnnnnnnnnnnnnnnnnnnnnnnnnnnnnnnnnnnnnnnnnnnnnnnnnnnnnnnnnnnnnnnnnnnnnnnnnnnnnnnnnnnnnnnnnnnnnnnnnnnnnnnnnnnnnnnnnnnnnnnnnnnnnnnnnnnnnnnnnnnnnnnnnnnnnnnnnnnnnnnnnnnnnnnnnnnnnnnnnnnnnnnnnnnnnnnnnnnnnnnnnnnnnnnnnnnnnnnnnnnnnnnnnnnnnnnnnnnnnnnnnnnnnnnnnnnnnnnnnnnnnnnnnnnnnnnnnnnnnnnnnnnnnnnnnnnnnnnnnnnnnnnnnnnnnnnnnnnnnnnnnnnnnnnnnnnnnnnnnnnnnnnnnnnnnnnnnnnnnnnnnnnnnnnnnnnnnnnnnnnnnnnnnnnnnnnnnnnnnnnnnnnnnnnnnnnnnnnnnnnnnnnnnnnnnnnnnnnnnnnnnnnnnnnnnnnnnnnnnnnnnnnnnnnnnnnnnnnnnnnnnnnnnnnnnnnnnnnnnnnnnnnnnnnnnnnnnnnnnnnnnnnnnnnnnnnnnnnnnnnnnnnnnnnnnnnnnnnnnnnnnnnnnnnnnnnnnnnnnnnnnnnnnnnnnnnnnnnnnnnnnnnnnnnnnnnnnnnnnnnnnnnnnnnnnnnnnnnnnnnnnnnnnnnnnnnnnnnnnnnnnnnnnnnnnnnnnnnnnnnnnnnnnnnnnnnnnnnnnnnnnnnnnnnnnnnnnnnnnnnnnnnnnnnnnnnnnnnnnnnnnnnnnnnnnnnnnnnnnnnnnnnnnnnnnnnnnnnnnnnnnnnnnnnnnnnnnnnnnnnnnnnnnnnnnnnnnnnnnnnnnnnnnnnnnnnnnnnnnnnnnnnnnnnnnnnnnnnnnnnnnnnnnnnnnnnnnnnnnnnnnnnnnnnnnnnnnnnnnnnnnnnnnnnnnnnnnnnnnnnnnnnnnnnnnnnnnnnnnnnnnnnnnnnnnnnnnnnnnnnnnnnnnnnnnnnnnnnnnnnnnnnnnnnnnnnnnnnnnnnnnnnnnnnnnnnnnnnnnnnnnnnnnnnnnnnnnnnnnnnnnnnnnnnnnnnnnnnnnnnnnnnnnnnnnnnnnnnnnnnnnnnnnnnnnnnnnnnnnnnnnnnnnnnnnnnnnnnnnnnnnnnnnnnnnnnnnnnnnnnnnnnnnnnnnnnnnnnnnnnnnnnnnnnnnnnnnnnnnnnnnnnnnnnnnnnnnnnnnnnnnnnnnnnnnnnnnnnnnnnnnnnnnnnnnnnnnnnnnnnnnnnnnnnnnnnnnnnnnnnnnnnnnnnnnnnnnnnnnnnnnnnnnnnnnnnnnnnnnnnnnnnnnnnnnnnnnnnnnnnnnnnnnnnnnnnnnnnnnnnnnnnnnnnnnnnnnnnnnnnnnnnnnnnnnnnnnnnnnnnnnnnnnnnnnnnnnnnnnnnnnnnnnnnnnnnnnnnnnnnnnnnnnnnnnnnnnnnnnnnnnnnnnnnnnnnnnnnnnnnnnnnnnnnnnnnnnnnnnnnnnnnnnnnnnnnnnnnnnnnnnnnnnnnnnnnnnnnnnnnnnnnnnnnnnnnnnnnnnnnnnnnnnnnnnnnnnnnnnnnnnnnnnnnnnnnnnnnnnnnnnnnnnnnnnnnnnnnnnnnnnnnnnnnnnnnnnnnnnnnnnnnnnnnnnnnnnnnnnnnnnnnnnnnnnnnnnnnnnnnnnnnnnnnnnnnnnnnnnnnnnnnnnnnnnnnnnnnnnnnnnnnnnnnnnnnnnnnnnnnnnnnnnnnnnnnnnnnnnnnnnnnnnnnnnnnnnnnnnnnnnnnnnnnnnnnnnnnnnnnnnnnnnnnnnnnnnnnnnnnnnnnnnnnnnnnnnnnnnnnnnnnnnnnnnnnnnnnnnnnnnnnnnnnnnnnnnnnnnnnnnnnnnnnnnnnnnnnnnnnnnnnnnnnnnnnnnnnnnnnnnnnnnnnnnnnnnnnnnnnnnnnnnnnnnnnnnnnnnnnnnnnnnnnnnnnnnnnnnnnnnnnnnnnnnnnnnnnnnnnnnnnnnnnnnnnnnnnnnnnnnnnnnnnnnnnnnnnnnnnnnnnnnnnnnnnnnnnnnnnnnnnnnnnnnnnnnnnnnnnnnnnnnnnnnnnnnnnnnnnnnnnnnnnnnnnnnnnnnnnnnnnnnnnnnnnnnnnnnnnnnnnnnnnnnnnnnnnnnnnnnnnnnnnnnnnnnnnnnnnnnnnnnnnnnnnnnnnnnnnnnnnnnnnnnnnnnnnnnnnnnnnnnnnnnnnnnnnnnnnnnnnnnnnnnnnnnnnnnnnnnnnnnnnnnnnnnnnnnnnnnnnnnnnnnnnnnnnnnnnnnnnnnnnnnnnnnnnnnnnnnnnnnnnnnnnnnnnnnnnnnnnnnnnnnnnnnnnnnnnnnnnnnnnnnnnnnnnnnnnnnnnnnnnnnnnnnnnnnnnnnnnnnnnnnnnnnnnnnnnnnnnnnnnnnnnnnnnnnnnnnnnnnnnnnnnnnnnnnnnnnnnnnnnnnnnnnnnnnnnnnnnnnnnnnnnnnnnnnnnnnnnnnnnnnnnnnnnnnnnnnnnnnnnnnnnnnnnnnnnnnnnnnnnnnnnnnnnnnnnnnnnnnnnnnnnnnnnnnnnnnnnnnnnnnnnnnnnnnnnnnnnnnnnnnnnnnnnnnnnnnnnnnnnnnnnnnnnnnnnnnnnnnnnnnnnnnnnnnnnnnnnnnnnnnnnnnnnnnnnnnnnnnnnnnnnnnnnnnnnnnnnnnnnnnnnnnnnnnnnnnnnnnnnnnnnnnnnnnnnnnnnnnnnnnnnnnnnnnnnnnnnnnnnnnnnnnnnnnnnnnnnnnnnnnnnnnnnnnnnnnnnnnnnnnnnnnnnnnnnnnnnnnnnnnnnnnnnnnnnnnnnnnnnnnnnnnnnnnnnnnnnnnnnnnnnnnnnnnnnnnnnnnnnnnnnnnnnnnnnnnnnnnnnnnnnnnnnnnnnnnnnnnnnnnnnnnnnnnnnnnnnnnnnnnnnnnnnnnnnnnnnnnnnnnnnnnnnnnnnnnnnnnnnnnnnnnnnnnnnnnnnnnnnnnnnnnnnnnnnnnnnnnnnnnnnnnnnnnnnnnnnnnnnnnnnnnnnnnnnnnnnnnnnnnnnnnnnnnnnnnnnnnnnnnnnnnnnnnnnnnnnnnnnnnnnnnnnnnnnnnnnnnnnnnnnnnnnnnnnnnnnnnnnnnnnnnnnnnnnnnnnnnnnnnnnnnnnnnnnnnnnnnnnnnnnnnnnnnnnnnnnnnnnnnnnnnnnnnnnnnnnnnnnnnnnnnnnnnnnnnnnnnnnnnnnnnnnnnnnnnnnnnnnnnnnnnnnnnnnnnnnnnnnnnnnnnnnnnnnnnnnnnnnnnnnnnnnnnnnnnnnnnnnnnnnnnnnnnnnnnnnnnnnnnnnnnnnnnnnnnnnnnnnnnnnnnnnnnnnnnnnnnnnnnnnnnnnnnnnnnnnnnnnnnnnnnnnnnnnnnnnnnnnnnnnnnnnnnnnnnnnnnnnnnnnnnnnnnnnnnnnnnnnnnnnnnnnnnnnnnnnnnnnnnnnnnnnnnnnnnnnnnnnnnnnnnnnnnnnnnnnnnnnnnnnnnnnnnnnnnnnnnnnnnnnnnnnnnnnnnnnnnnnnnnnnnnnnnnnnnnnnnnnnnnnnnnnnnnnnnnnnnnnnnnnnnnnnnnnnnnnnnnnnnnnnnnnnnnnnnnnnnnnnnnnnnnnnnnnnnnnnnnnnnnnnnnnnnnnnnnnnnnnnnnnnnnnnnnnnnnnnnnnnnnnnnnnnnnnnnnnnnnnnnnnnnnnnnnnnnnnnnnnnnnnnnnnnnnnnnnnnnnnnnnnnnnnnnnnnnnnnnnnnnnnnnnnnnnnnnnnnnnnnnnnnnnnnnnnnnnnnnnnnnnnnnnnnnnnnnnnnnnnnnnnnnnnnnnnnnnnnnnnnnnnnnnnnnnnnnnnnnnnnnnnnnnnnnnnnnnnnnnnnnnnnnnnnnnnnnnnnnnnnnnnnnnnnnnnnnnnnnnnnnnnnnnnnnnnnnnnnnnnnnnnnnnnnnnnnnnnnnnnnnnnnnnnnnnnnnnnnnnnnnnnnnnnnnnnnnnnnnnnnnnnnnnnnnnnnnnnnnnnnnnnnnnnnnnnnnnnnnnnnnnnnnnnnnnnnnnnnnnnnnnnnnnnnnnnnnnnnnnnnnnnnnnnnnnnnnnnnnnnnnnnnnnnnnnnnnnnnnnnnnnnnnnnnnnnnnnnnnnnnnnnnnnnnnnnnnnnnnnnnnnnnnnnnnnnnnnnnnnnnnnnnnnnnnnnnnnnnnnnnnnnnnnnnnnnnnnnnnnnnnnnnnnnnnnnnnnnnnnnnnnnnnnnnnnnnnnnnnnnnnnnnnnnnnnnnnnnnnnnnnnnnnnnnnnnnnnnnnnnnnnnnnnnnnnnnnnnnnnnnnnnnnnnnnnnnnnnnnnnnnnnnnnnnnnnnnnnnnnnnnnnnnnnnnnnnnnnnnnnnnnnnnnnnnnnnnnnnnnnnnnnnnnnnnnnnnnnnnnnnnnnnnnnnnnnnnnnnnnnnnnnnnnnnnnnnnnnnnnnnnnnnnnnnnnnnnnnnnnnnnnnnnnnnnnnnnnnnnnnnnnnnnnnnnnnnnnnnnnnnnnnnnnnnnnnnnnnnnnnnnnnnnnnnnnnnnnnnnnnnnnnnnnnnnnnnnnnnnnnnnnnnnnnnnnnnnnnnnnnnnnnnnnnnnnnnnnnnnnnnnnnnnnnnnnnnnnnnnnnnnnnnnnnnnnnnnnnnnnnnnnnnnnnnnnnnnnnnnnnnnnnnnnnnnnnnnnnnnnnnnnnnnnnnnnnnnnnnnnnnnnnnnnnnnnnnnnnnnnnnnnnnnnnnnnnnnnnnnnnnnnnnnnnnnnnnnnnnnnnnnnnnnnnnnnnnnnnnnnnnnnnnnnnnnnnnnnnnnnnnnnnnnnnnnnnnnnnnnnnnnnnnnnnnnnnnnnnnnnnnnnnnnnnnnnnnnnnnnnnnnnnnnnnnnnnnnnnnnnnnnnnnnnnnnnnnnnnnnnnnnnnnnnnnnnnnnnnnnnnnnnnnnnnnnnnnnnnnnnnnnnnnnnnnnnnnnnnnnnnnnnnnnnnnnnnnnnnnnnnnnnnnnnnnnnnnnnnnnnnnnnnnnnnnnnnnnnnnnnnnnnnnnnnnnnnnnnnnnnnnnnnnnnnnnnnnnnnnnnnnnnnnnnnnnnnnnnnnnnnnnnnnnnnnnnnnnnnnnnnnnnnnnnnnnnnnnnnnnnnnnnnnnnnnnnnnnnnnnnnnnnnnnnnnnnnnnnnnnnnnnnnnnnnnnnnnnnnnnnnnnnnnnnnnnnnnnnnnnnnnnnnnnnnnnnnnnnnnnnnnnnnnnnnnnnnnnnnnnnnnnnnnnnnnnnnnnnnnnnnnnnnnnnnnnnnnnnnnnnnnnnnnnnnnnnnnnnnnnnnnnnnnnnnnnnnnnnnnnnnnnnnnnnnnnnnnnnnnnnnnnnnnnnnnnnnnnnnnnnnnnnnnnnnnnnnnnnnnnnnnnnnnnnnnnnnnnnnnnnnnnnnnnnnnnnnnnnnnnnnnnnnnnnnnnnnnnnnnnnnnnnnnnnnnnnnnnnnnnnnnnnnnnnnnnnnnnnnnnnnnnnnnnnnnnnnnnnnnnnnnnnnnnnnnnnnnnnnnnnnnnnnnnnnnnnnnnnnnnnnnnnnnnnnnnnnnnnnnnnnnnnnnnnnnnnnnnnnnnnnnnnnnnnnnnnnnnnnnnnnnnnnnnnnnnnnnnnnnnnnnnnnnnnnnnnnnnnnnnnnnnnnnnnnnnnnnnnnnnnnnnnnnnnnnnnnnnnnnnnnnnnnnnnnnnnnnnnnnnnnnnnnnnnnnnnnnnnnnnnnnnnnnnnnnnnnnnnnnnnnnnnnnnnnnnnnnnnnnnnnnnnnnnnnnnnnnnnnnnnnnnnnnnnnnnnnnnnnnnnnnnnnnnnnnnnnnnnnnnnnnnnnnnnnnnnnnnnnnnnnnnnnnnnnnnnnnnnnnnnnnnnnnnnnnnnnnnnnnnnnnnnnnnnnnnnnnnnnnnnnnnnnnnnnnnnnnnnnnnnnnnnnnnnnnnnnnnnnnnnnnnnnnnnnnnnnnnnnnnnnnnnnnnnnnnnnnnnnnnnnnnnnnnnnnnnnnnnnnnnnnnnnnnnnnnnnnnnnnnnnnnnnnnnnnnnnnnnnnnnnnnnnnnnnnnnnnnnnnnnnnnnnnnnnnnnnnnnnnnnnnnnnnnnnnnnnnnnnnnnnnnnnnnnnnnnnnnnnnnnnnnnnnnnnnnnnnnnnnnnnnnnnnnnnnnnnnnnnnnnnnnnnnnnnnnnnnnnnnnnnnnnnnnnnnnnnnnnnnnnnnnnnnnnnnnnnnnnnnnnnnnnnnnnnnnnnnnnnnnnnnnnnnnnnnnnnnnnnnnnnnnnnnnnnnnnnnnnnnnnnnnnnnnnnnnnnnnnnnnnnnnnnnnnnnnnnnnnnnnnnnnnnnnnnnnnnnnnnnnnnnnnnnnnnnnnnnnnnnnnnnnnnnnnnnnnnnnnnnnnnnnnnnnnnnnnnnnnnnnnnnnnnnnnnnnnnnnnnnnnnnnnnnnnnnnnnnnnnnnnnnnnnnnnnnnnnnnnnnnnnnnnnnnnnnnnnnnnnnnnnnnnnnnnnnnnnnnnnnnnnnnnnnnnnnnnnnnnnnnnnnnnnnnnnnnnnnnnnnnnnnnnnnnnnnnnnnnnnnnnnnnnnnnnnnnnnnnnnnnnnnnnnnnnnnnnnnnnnnnnnnnnnnnnnnnnnnnnnnnnnnnnnnnnnnnnnnnnnnnnnnnnnnnnnnnnnnnnnnnnnnnnnnnnnnnnnnnnnnnnnnnnnnnnnnnnnnnnnnnnnnnnnnnnnnnnnnnnnnnnnnnnnnnnnnnnnnnnnnnnnnnnnnnnnnnnnnnnnnnnnnnnnnnnnnnnnnnnnnnnnnnnnnnnnnnnnnnnnnnnnnnnnnnnnnnnnnnnnnnnnnnnnnnnnnnnnnnnnnnnnnnnnnnnnnnnnnnnnnnnnnnnnnnnnnnnnnnnnnnnnnnnnnnnnnnnnnnnnnnnnnnnnnnnnnnnnnnnnnnnnnnnnnnnnnnnnnnnnnnnnnnnnnnnnnnnnnnnnnnnnnnnnnnnnnnnnnnnnnnnnnnnnnnnnnnnnnnnnnnnnnnnnnnnnnnnnnnnnnnnnnnnnnnnnnnnnnnnnnnnnnnnnnnnnnnnnnnnnnnnnnnnnnnnnnnnnnnnnnnnnnnnnnnnnnnnnnnnnnnnnnnnnnnnnnnnnnnnnnnnnnnnnnnnnnnnnnnnnnnnnnnnnnnnnnnnnnnnnnnnnnnnnnnnnnnnnnnnnnnnnnnnnnnnnnnnnnnnnnnnnnnnnnnnnnnnnnnnnnnnnnnnnnnnnnnnnnnnnnnnnnnnnnnnnnnnnnnnnnnnnnnnnnnnnnnnnnnnnnnnnnnnnnnnnnnnnnnnnnnnnnnnnnnnnnnnnnnnnnnnnnnnnnnnnnnnnnnnnnnnnnnnnnnnnnnnnnnnnnnnnnnnnnnnnnnnnnnnnnnnnnnnnnnnnnnnnnnnnnnnnnnnnnnnnnnnnnnnnnnnnnnnnnnnnnnnnnnnnnnnnnnnnnnnnnnnnnnnnnnnnnnnnnnnnnnnnnnnnnnnnnnnnnnnnnnnnnnnnnnnnnnnnnnnnnnnnnnnnnnnnnnnnnnnnnnnnnnnnnnnnnnnnnnnnnnnnnnnnnnnnnnnnnnnnnnnnnnnnnnnnnnnnnnnnnnnnnnnnnnnnnnnnnnnnnnnnnnnnnnnnnnnnnnnnnnnnnnnnnnnnnnnnnnnnnnnnnnnnnnnnnnnnnnnnnnnnnnnnnnnnnnnnnnnnnnnnnnnnnnnnnnnnnnnnnnnnnnnnnnnnnnnnnnnnnnnnnnnnnnnnnnnnnnnnnnnnnnnnnnnnnnnnnnnnnnnnnnnnnnnnnnnnnnnnnnnnnnnnnnnnnnnnnnnnnnnnnnnnnnnnnnnnnnnnnnnnnnnnnnnnnnnnnnnnnnnnnnnnnnnnnnnnnnnnnnnnnnnnnnnnnnnnnnnnnnnnnnnnnnnnnnnnnnnnnnnnnnnnnnnnnnnnnnnnnnnnnnnnnnnnnnnnnnnnnnnnnnnnnnnnnnnnnnnnnnnnnnnnnnnnnnnnnnnnnnnnnnnnnnnnnnnnnnnnnnnnnnnnnnnnnnnnnnnnnnnnnnnnnnnnnnnnnnnnnnnnnnnnnnnnnnnnnnnnnnnnnnnnnnnnnnnnnnnnnnnnnnnnnnnnnnnnnnnnnnnnnnnnnnnnnnnnnnnnnnnnnnnnnnnnnnnnnnnnnnnnnnnnnnnnnnnnnnnnnnnnnnnnnnnnnnnnnnnnnnnnnnnnnnnnnnnnnnnnnnnnnnnnnnnnnnnnnnnnnnnnnnnnnnnnnnnnnnnnnnnnnnnnnnnnnnnnnnnnnnnnnnnnnnnnnnnnnnnnnnnnnnnnnnnnnnnnnnnnnnnnnnnnnnnnnnnnnnnnnnnnnnnnnnnnnnnnnnnnnnnnnnnnnnnnnnnnnnnnnnnnnnnnnnnnnnnnnnnnnnnnnnnnnnnnnnnnnnnnnnnnnnnnnnnnnnnnnnnnnnnnnnnnnnnnnnnnnnnnnnnnnnnnnnnnnnnnnnnnnnnnnnnnnnnnnnnnnnnnnnnnnnnnnnnnnnnnnnnnnnnnnnnnnnnnnnnnnnnnnnnnnnnnnnnnnnnnnnnnnnnnnnnnnnnnnnnnnnnnnnnnnnnnnnnnnnnnnnnnnnnnnnnnnnnnnnnnnnnnnnnnnnnnnnnnnnnnnnnnnnnnnnnnnnnnnnnnnnnnnnnnnnnnnnnnnnnnnnnnnnnnnnnnnnnnnnnnnnnnnnnnnnnnnnnnnnnnnnnnnnnnnnnnnnnnnnnnnnnnnnnnnnnnnnnnnnnnnnnnnnnnnnnnnnnnnnnnnnnnnnnnnnnnnnnnnnnnnnnnnnnnnnnnnnnnnnnnnnnnnnnnnnnnnnnnnnnnnnnnnnnnnnnnnnnnnnnnnnnnnnnnnnnnnnnnnnnnnnnnnnnnnnnnnnnnnnnnnnnnnnnnnnnnnnnnnnnnnnnnnnnnnnnnnnnnnnnnnnnnnnnnnnnnnnnnnnnnnnnnnnnnnnnnnnnnnnnnnnnnnnnnnnnnnnnnnnnnnnnnnnnnnnnnnnnnnnnnnnnnnnnnnnnnnnnnnnnnnnnnnnnnnnnnnnnnnnnnnnnnnnnnnnnnnnnnnnnnnnnnnnnnnnnnnnnnnnnnnnnnnnnnnnnnnnnnnnnnnnnnnnnnnnnnnnnnnnnnnnnnnnnnnnnnnnnnnnnnnnnnnnnnnnnnnnnnnnnnnnnnnnnnnnnnnnnnnnnnnnnnnnnnnnnnnnnnnnnnnnnnnnnnnnnnnnnnnnnnnnnnnnnnnnnnnnnnnnnnnnnnnnnnnnnnnnnnnnnnnnnnnnnnnnnnnnnnnnnnnnnnnnnnnnnnnnnnnnnnnnnnnnnnnnnnnnnnnnnnnnnnnnnnnnnnnnnnnnnnnnnnnnnnnnnnnnnnnnnnnnnnnnnnnnnnnnnnnnnnnnnnnnnnnnnnnnnnnnnnnnnnnnnnnnnnnnnnnnnnnnnnnnnnnnnnnnnnnnnnnnnnnnnnnnnnnnnnnnnnnnnnnnnnnnnnnnnnnnnnnnnnnnnnnnnnnnnnnnnnnnnnnnnnnnnnnnnnnnnnnnnnnnnnnnnnnnnnnnnnnnnnnnnnnnnnnnnnnnnnnnnnnnnnnnnnnnnnnnnnnnnnnnnnnnnnnnnnnnnnnnnnnnnnnnnnnnnnnnnnnnnnnnnnnnnnnnnnnnnnnnnnnnnnnnnnnnnnnnnnnnnnnnnnnnnnnnnnnnnnnnnnnnnnnnnnnnnnnnnnnnnnnnnnnnnnnnnnnnnnnnnnnnnnnnnnnnnnnnnnnnnnnnnnnnnnnnnnnnnnnnnnnnnnnnnnnnnnnnnnnnnnnnnnnnnnnnnnnnnnnnnnnnnnnnnnnnnnnnnnnnnnnnnnnnnnnnnnnnnnnnnnnnnnnnnnnnnnnnnnnnnnnnnnnnnnnnnnnnnnnnnnnnnnnnnnnnnnnnnnnnnnnnnnnnnnnnnnnnnnnnnnnnnnnnnnnnnnnnnnnnnnnnnnnnnnnnnnnnnnnnnnnnnnnnnnnnnnnnnnnnnnnnnnnnnnnnnnnnnnnnnnnnnnnnnnnnnnnnnnnnnnnnnnnnnnnnnnnnnnnnnnnnnnnnnnnnnnnnnnnnnnnnnnnnnnnnnnnnnnnnnnnnnnnnnnnnnnnnnnnnnnnnnnnnnnnnnnnnnnnnnnnnnnnnnnnnnnnnnnnnnnnnnnnnnnnnnnnnnnnnnnnnnnnnnnnnnnnnnnnnnnnnnnnnnnnnnnnnnnnnnnnnnnnnnnnnnnnnnnnnnnnnnnnnnnnnnnnnnnnnnnnnnnnnnnnnnnnnnnnnnnnnnnnnnnnnnnnnnnnnnnnnnnnnnnnnnnnnnnnnnnnnnnnnnnnnnnnnnnnnnnnnnnnnnnnnnnnnnnnnnnnnnnnnnnnnnnnnnnnnnnnnnnnnnnnnnnnnnnnnnnnnnnnnnnnnnnnnnnnnnnnnnnnnnnnnnnnnnnnnnnnnnnnnnnnnnnnnnnnnnnnnnnnnnnnnnnnnnnnnnnnnnnnnnnnnnnnnnnnnnnnnnnnnnnnnnnnnnnnnnnnnnnnnnnnnnnnnnnnnnnnnnnnnnnnnnnnnnnnnnnnnnnnnnnnnnnnnnnnnnnnnnnnnnnnnnnnnnnnnnnnnnnnnnnnnnnnnnnnnnnnnnnnnnnnnnnnnnnnnnnnnnnnnnnnnnnnnnnnnnnnnnnnnnnnnnnnnnnnnnnnnnnnnnnnnnnnnnnnnnnnnnnnnnnnnnnnnnnnnnnnnnnnnnnnnnnnnnnnnnnnnnnnnnnnnnnnnnnnnnnnnnnnnnnnnnnnnnnnnnnnnnnnnnnnnnnnnnnnnnnnnnnnnnnnnnnnnnnnnnnnnnnnnnnnnnnnnnnnnnnnnnnnnnnnnnnnnnnnnnnnnnnnnnnnnnnnnnnnnnnnnnnnnnnnnnnnnnnnnnnnnnnnnnnnnnnnnnnnnnnnnnnnnnnnnnnnnnnnnnnnnnnnnnnnnnnnnnnnnnnnnnnnnnnnnnnnnnnnnnnnnnnnnnnnnnnnnnnnnnnnnnnnnnnnnnnnnnnnnnnnnnnnnnnnnnnnnnnnnnnnnnnnnnnnnnnnnnnnnnnnnnnnnnnnnnnnnnnnnnnnnnnnnnnnnnnnnnnnnnnnnnnnnnnnnnnnnnnnnnnnnnnnnnnnnnnnnnnnnnnnnnnnnnnnnnnnnnnnnnnnnnnnnnnnnnnnnnnnnnnnnnnnnnnnnnnnnnnnnnnnnnnnnnnnnnnnnnnnnnnnnnnnnnnnnnnnnnnnnnnnnnnnnnnnnnnnnnnnnnnnnnnnnnnnnnnnnnnnnnnnnnnnnnnnnnnnnnnnnnnnnnnnnnnnnnnnnnnnnnnnnnnnnnnnnnnnnnnnnnnnnnnnnnnnnnnnnnnnnnnnnnnnnnnnnnnnnnnnnnnnnnnnnnnnnnnnnnnnnnnnnnnnnnnnnnnnnnnnnnnnnnnnnnnnnnnnnnnnnnnnnnnnnnnnnnnnnnnnnnnnnnnnnnnnnnnnnnnnnnnnnnnnnnnnnnnnnnnnnnnnnnnnnnnnnnnnnnnnnnnnnnnnnnnnnnnnnnnnnnnnnnnnnnnnnnnnnnnnnnnnnnnnnnnnnnnnnnnnnnnnnnnnnnnnnnnnnnnnnnnnnnnnnnnnnnnnnnnnnnnnnnnnnnnnnnnnnnnnnnnnnnnnnnnnnnnnnnnnnnnnnnnnnnnnnnnnnnnnnnnnnnnnnnnnnnnnnnnnnnnnnnnnnnnnnnnnnnnnnnnnnnnnnnnnnnnnnnnnnnnnnnnnnnnnnnnnnnnnnnnnnnnnnnnnnnnnnnnnnnnnnnnnnnnnnnnnnnnnnnnnnnnnnnnnnnnnnnnnnnnnnnnnnnnnnnnnnnnnnnnnnnnnnnnnnnnnnnnnnnnnnnnnnnnnnnnnnnnnnnnnnnnnnnnnnnnnnnnnnnnnnnnnnnnnnnnnnnnnnnnnnnnnnnnnnnnnnnnnnnnnnnnnnnnnnnnnnnnnnnnnnnnnnnnnnnnnnnnnnnnnnnnnnnnnnnnnnnnnnnnnnnnnnnnnnnnnnnnnnnnnnnnnnnnnnnnnnnnnnnnnnnnnnnnnnnnnnnnnnnnnnnnnnnnnnnnnnnnnnnnnnnnnnnnnnnnnnnnnnnnnnnnnnnnnnnnnnnnnnnnnnnnnnnnnnnnnnnnnnnnnnnnnnnnnnnnnnnnnnnnnnnnnnnnnnnnnnnnnnnnnnnnnnnnnnnnnnnnnnnnnnnnnnnnnnnnnnnnnnnnnnnnnnnnnnnnnnnnnnnnnnnnnnnnnnnnnnnnnnnnnnnnnnnnnnnnnnnnnnnnnnnnnnnnnnnnnnnnnnnnnnnnnnnnnnnnnnnnnnnnnnnnnnnnnnnnnnnnnnnnnnnnnnnnnnnnnnnnnnnnnnnnnnnnnnnnnnnnnnnnnnnnnnnnnnnnnnnnnnnnnnnnnnnnnnnnnnnnnnnnnnnnnnnnnnnnnnnnnnnnnnnnnnnnnnnnnnnnnnnnnnnnnnnnnnnnnnnnnnnnnnnnnnnnnnnnnnnnnnnnnnnnnnnnnnnnnnnnnnnnnnnnnnnnnnnnnnnnnnnnnnnnnnnnnnnnnnnnnnnnnnnnnnnnnnnnnnnnnnnnnnnnnnnnnnnnnnnnnnnnnnnnnnnnnnnnnnnnnnnnnnnnnnnnnnnnnnnnnnnnnnnnnnnnnnnnnnnnnnnnnnnnnnnnnnnnnnnnnnnnnnnnnnnnnnnnnnnnnnnnnnnnnnnnnnnnnnnnnnnnnnnnnnnnnnnnnnnnnnnnnnnnnnnnnnnnnnnnnnnnnnnnnnnnnnnnnnnnnnnnnnnnnnnnnnnnnnnnnnnnnnnnnnnnnnnnnnnnnnnnnnnnnnnnnnnnnnnnnnnnnnnnnnnnnnnnnnnnnnnnnnnnnnnnnnnnnnnnnnnnnnnnnnnnnnnnnnnnnnnnnnnnnnnnnnnnnnnnnnnnnnnnnnnnnnnnnnnnnnnnnnnnnnnnnnnnnnnnnnnnnnnnnnnnnnnnnnnnnnnnnnnnnnnnnnnnnnnnnnnnnnnnnnnnnnnnnnnnnnnnnnnnnnnnnnnnnnnnnnnnnnnnnnnnnnnnnnnnnnnnnnnnnnnnnnnnnnnnnnnnnnnnnnnnnnnnnnnnnnnnnnnnnnnnnnnnnnnnnnnnnnnnnnnnnnnnnnnnnnnnnnnnnnnnnnnnnnnnnnnnnnnnnnnnnnnnnnnnnnnnnnnnnnnnnnnnnnnnnnnnnnnnnnnnnnnnnnnnnnnnnnnnnnnnnnnnnnnnnnnnnnnnnnnnnnnnnnnnnnnnnnnnnnnnnnnnnnnnnnnnnnnnnnnnnnnnnnnnnnnnnnnnnnnnnnnnnnnnnnnnnnnnnnnnnnnnnnnnnnnnnnnnnnnnnnnnnnnnnnnnnnnnnnnnnnnnnnnnnnnnnnnnnnnnnnnnnnnnnnnnnnnnnnnnnnnnnnnnnnnnnnnnnnnnnnnnnnnnnnnnnnnnnnnnnnnnnnnnnnnnnnnnnnnnnnnnnnnnnnnnnnnnnnnnnnnnnnnnnnnnnnnnnnnnnnnnnnnnnnnnnnnnnnnnnnnnnnnnnnnnnnnnnnnnnnnnnnnnnnnnnnnnnnnnnnnnnnnnnnnnnnnnnnnnnnnnnnnnnnnnnnnnnnnnnnnnnnnnnnnnnnnnnnnnnnnnnnnnnnnnnnnnnnnnnnnnnnnnnnnnnnnnnnnnnnnnnnnnnnnnnnnnnnnnnnnnnnnnnnnnnnnnnnnnnnnnnnnnnnnnnnnnnnnnnnnnnnnnnnnnnnnnnnnnnnnnnnnnnnnnnnnnnnnnnnnnnnnnnnnnnnnnnnnnnnnnnnnnnnnnnnnnnnnnnnnnnnnnnnnnnnnnnnnnnnnnnnnnnnnnnnnnnnnnnnnnnnnnnnnnnnnnnnnnnnnnnnnnnnnnnnnnnnnnnnnnnnnnnnnnnnnnnnnnnnnnnnnnnnnnnnnnnnnnnnnnnnnnnnnnnnnnnnnnnnnnnnnnnnnnnnnnnnnnnnnnnnnnnnnnnnnnnnnnnnnnnnnnnnnnnnnnnnnnnnnnnnnnnnnnnnnnnnnnnnnnnnnnnnnnnnnnnnnnnnnnnnnnnnnnnnnnnnnnnnnnnnnnnnnnnnnnnnnnnnnnnnnnnnnnnnnnnnnnnnnnnnnnnnnnnnnnnnnnnnnnnnnnnnnnnnnnnnnnnnnnnnnnnnnnnnnnnnnnnnnnnnnnnnnnnnnnnnnnnnnnnnnnnnnnnnnnnnnnnnnnnnnnnnnnnnnnnnnnnnnnnnnnnnnnnnnnnnnnnnnnnnnnnnnnnnnnnnnnnnnnnnnnnnnnnnnnnnnnnnnnnnnnnnnnnnnnnnnnnnnnnnnnnnnnnnnnnnnnnnnnnnnnnnnnnnnnnnnnnnnnnnnnnnnnnnnnnnnnnnnnnnnnnnnnnnnnnnnnnnnnnnnnnnnnnnnnnnnnnnnnnnnnnnnnnnnnnnnnnnnnnnnnnnnnnnnnnnnnnnnnnnnnnnnnnnnnnnnnnnnnnnnnnnnnnnnnnnnnnnnnnnnnnnnnnnnnnnnnnnnnnnnnnnnnnnnnnnnnnnnnnnnnnnnnnnnnnnnnnnnnnnnnnnnnnnnnnnnnnnnnnnnnnnnnnnnnnnnnnnnnnnnnnnnnnnnnnnnnnnnnnnnnnnnnnnnnnnnnnnnnnnnnnnnnnnnnnnnnnnnnnnnnnnnnnnnnnnnnnnnnnnnnnnnnnnnnnnnnnnnnnnnnnnnnnnnnnnnnnnnnnnnnnnnnnnnnnnnnnnnnnnnnnnnnnnnnnnnnnnnnnnnnnnnnnnnnnnnnnnnnnnnnnnnnnnnnnnnnnnnnnnnnnnnnnnnnnnnnnnnnnnnnnnnnnnnnnnnnnnnnnnnnnnnnnnnnnnnnnnnnnnnnnnnnnnnnnnnnnnnnnnnnnnnnnnnnnnnnnnnnnnnnnnnnnnnnnnnnnnnnnnnnnnnnnnnnnnnnnnnnnnnnnnnnnnnnnnnnnnnnnnnnnnnnnnnnnnnnnnnnnnnnnnnnnnnnnnnnnnnnnnnnnnnnnnnnnnnnnnnnnnnnnnnnnnnnnnnnnnnnnnnnnnnnnnnnnnnnnnnnnnnnnnnnnnnnnnnnnnnnnnnnnnnnnnnnnnnnnnnnnnnnnnnnnnnnnnnnnnnnnnnnnnnnnnnnnnnnnnnnnnnnnnnnnnnnnnnnnnnnnnnnnnnnnnnnnnnnnnnnnnnnnnnnnnnnnnnnnnnnnnnnnnnnnnnnnnnnnnnnnnnnnnnnnnnnnnnnnnnnnnnnnnnnnnnnnnnnnnnnnnnnnnnnnnnnnnnnnnnnnnnnnnnnnnnnnnnnnnnnnnnnnnnnnnnnnnnnnnnnnnnnnnnnnnnnnnnnnnnnnnnnnnnnnnnnnnnnnnnnnnnnnnnnnnnnnnnnnnnnnnnnnnnnnnnnnnnnnnnnnnnnnnnnnnnnnnnnnnnnnnnnnnnnnnnnnnnnnnnnnnnnnnnnnnnnnnnnnnnnnnnnnnnnnnnnnnnnnnnnnnnnnnnnnnnnnnnnnnnnnnnnnnnnnnnnnnnnnnnnnnnnnnnnnnnnnnnnnnnnnnnnnnnnnnnnnnnnnnnnnnnnnnnnnnnnnnnnnnnnnnnnnnnnnnnnnnnnnnnnnnnnnnnnnnnnnnnnnnnnnnnnnnnnnnnnnnnnnnnnnnnnnnnnnnnnnnnnnnnnnnnnnnnnnnnnnnnnnnnnnnnnnnnnnnnnnnnnnnnnnnnnnnnnnnnnnnnnnnnnnnnnnnnnnnnnnnnnnnnnnnnnnnnnnnnnnnnnnnnnnnnnnnnnnnnnnnnnnnnnnnnnnnnnnnnnnnnnnnnnnnnnnnnnnnnnnnnnnnnnnnnnnnnnnnnnnnnnnnnnnnnnnnnnnnnnnnnnnnnnnnnnnnnnnnnnnnnnnnnnnnnnnnnnnnnnnnnnnnnnnnnnnnnnnnnnnnnnnnnnnnnnnnnnnnnnnnnnnnnnnnnnnnnnnnnnnnnnnnnnnnnnnnnnnnnnnnnnnnnnnnnnnnnnnnnnnnnnnnnnnnnnnnnnnnnnnnnnnnnnnnnnnnnnnnnnnnnnnnnnnnnnnnnnnnnnnnnnnnnnnnnnnnnnnnnnnnnnnnnnnnnnnnnnnnnnnnnnnnnnnnnnnnnnnnnnnnnnnnnnnnnnnnnnnnnnnnnnnnnnnnnnnnnnnnnnnnnnnnnnnnnnnnnnnnnnnnnnnnnnnnnnnnnnnnnnnnnnnnnnnnnnnnnnnnnnnnnnnnnnnnnnnnnnnnnnnnnnnnnnnnnnnnnnnnnnnnnnnnnnnnnnnnnnnnnnnnnnnnnnnnnnnnnnnnnnnnnnnnnnnnnnnnnnnnnnnnnnnnnnnnnnnnnnnnnnnnnnnnnnnnnnnnnnnnnnnnnnnnnnnnnnnnnnnnnnnnnnnnnnnnnnnnnnnnnnnnnnnnnnnnnnnnnnnnnnnnnnnnnnnnnnnnnnnnnnnnnnnnnnnnnnnnnnnnnnnnnnnnnnnnnnnnnnnnnnnnnnnnnnnnnnnnnnnnnnnnnnnnnnnnnnnnnnnnnnnnnnnnnnnnnnnnnnnnnnnnnnnnnnnnnnnnnnnnnnnnnnnnnnnnnnnnnnnnnnnnnnnnnnnnnnnnnnnnnnnnnnnnnnnnnnnnnnnnnnnnnnnnnnnnnnnnnnnnnnnnnnnnnnnnnnnnnnnnnnnnnnnnnnnnnnnnnnnnnnnnnnnnnnnnnnnnnnnnnnnnnnnnnnnnnnnnnnnnnnnnnnnnnnnnnnnnnnnnnnnnnnnnnnnnnnnnnnnnnnnnnnnnnnnnnnnnnnnnnnnnnnnnnnnnnnnnnnnnnnnnnnnnnnnnnnnnnnnnnnnnnnnnnnnnnnnnnnnnnnnnnnnnnnnnnnnnnnnnnnnnnnnnnnnnnnnnnnnnnnnnnnnnnnnnnnnnnnnnnnnnnnnnnnnnnnnnnnnnnnnnnnnnnnnnnnnnnnnnnnnnnnnnnnnnnnnnnnnnnnnnnnnnnnnnnnnnnnnnnnnnnnnnnnnnnnnnnnnnnnnnnnnnnnnnnnnnnnnnnnnnnnnnnnnnnnnnnnnnnnnnnnnnnnnnnnnnnnnnnnnnnnnnnnnnnnnnnnnnnnnnnnnnnnnnnnnnnnnnnnnnnnnnnnnnnnnnnnnnnnnnnnnnnnnnnnnnnnnnnnnnnnnnnnnnnnnnnnnnnnnnnnnnnnnnnnnnnnnnnnnnnnnnnnnnnnnnnnnnnnnnnnnnnnnnnnnnnnnnnnnnnnnnnnnnnnnnnnnnnnnnnnnnnnnnnnnnnnnnnnnnnnnnnnnnnnnnnnnnnnnnnnnnnnnnnnnnnnnnnnnnnnnnnnnnnnnnnnnnnnnnnnnnnnnnnnnnnnnnnnnnnnnnnnnnnnnnnnnnnnnnnnnnnnnnnnnnnnnnnnnnnnnnnnnnnnnnnnnnnnnnnnnnnnnnnnnnnnnnnnnnnnnnnnnnnnnnnnnnnnnnnnnnnnnnnnnnnnnnnnnnnnnnnnnnnnnnnnnnnnnnnnnnnnnnnnnnnnnnnnnnnnnnnnnnnnnnnnnnnnnnnnnnnnnnnnnnnnnnnnnnnnnnnnnnnnnnnnnnnnnnnnnnnnnnnnnnnnnnnnnnnnnnnnnnnnnnnnnnnnnnnnnnnnnnnnnnnnnnnnnnnnnnnnnnnnnnnnnnnnnnnnnnnnnnnnnnnnnnnnnnnnnnnnnnnnnnnnnnnnnnnnnnnnnnnnnnnnnnnnnnnnnnnnnnnnnnnnnnnnnnnnnnnnnnnnnnnnnnnnnnnnnnnnnnnnnnnnnnnnnnnnnnnnnnnnnnnnnnnnnccttgagagactccgcccgcattcgacagatcgcggcgaacaatccgatggaccgggtcgcgattctgcggtttctgctcgcgattctctattggagccggggcaatccgcccgagaatgcttccgaaacatccggcccgatatttacggaagaggcgttcgccaaactcgagacgcatcgcaattgcttcaacctgctgggggagggaaagcggttctatcaagatcgtggtgcatcccggatgcgtccgactacggacttgatacaagagattccgactgggaacaatttctggcatttcaagcattcgacagatggacaaaatgggctttgtccagtttgttgtgttatcggactcttgaggcttcctctgttttccgtcagtggccttcccgacttaaaggccgggatcaacggcactccccctatctacgttgttcggtgtggcgattcgttgcaggaaacgctctattttaactgggttacttgcgaaaagataggccagccttcttgggacaaatcatgtcccctccaagatagagatccgggcgtacctattcttcaggggttaacgcttctttccaggcgagtcttcttgcaccctccatcgaatgacgccgttggtgggtgtattagctgcggatctgtgaaggggcctcttattcgtacctgtgagttccagtctgctggcccgcaggaaaatccagattggaccgatccacacgtcctgtactcaacagaaacaccccgcaaatcttcgaaagcgcctgacttgaccgcagggaagaaatttcgaatggatcgcccgtggtttgatttgcttaccaggatgatagaaatggggaagttgtcttcccagaatcagtctctcaggtttcttcttgtcggttttgctacagacaaagcgaaaaatatcgatgtctgggaacgcactctcgttttacccgttgagttctctccatcagaggttttctccattcagattgagcaatggaagaaaggaaactggtatctggagaaatcgttgggtaggtcaaagacgaatggtccagctgcaatctcgaccattcgtccccatgtcgaaaatcaagtctctgacaggctgtccgatttattgggcggcggcgaagaggcctggagattggccgcggaggaatatcgtcccctgatgaagtctctcgcgcgatcgctttccccaggcttcacgacagaagcggtcgctctgcggcgcaagatcgccaggacggtacccgatatgacgcccaaggcggaaacaccggagaagaaactccgaatcagcaagaaggagaagaagggatgaacgatcccgagaagaaaggaggaagacccgatgaatgctgccacacatgaatacataaaacgactgacttgtttgaaggttggcgatctggggctgttacgcacgcacgccggtcaagggctggacgagtcgcttgaaggtttcgacttgtttacggggctgtggtggcccttgcgccagaaaaatcagagagcgccccgacgctcgaccgcctggcttatcgccaaactctacgcgttccagcccgtcgagcatggagaggagcaatttctggcgagccagttgcggcgctgcgaaccgcgagaggaacgggaacggaaacggttccgtaacaagttcgacgccttgttacgccagccgctcgaacggatcgaaccggcgttgcaatgggccatccgggagattgcctcaaatccagtggggcttcggtttgactgggttcaattgaccgatgatctttccatctgggaacgggaagaaacccgcctgaaatgggcggagcaatatctggaaaaaaacaccacaggcctgccgcctgtcgagacttctgtgtccgagaacgaaaggaccccaccatgttgattgaaatccatgccattcagaatcacagcccggccaacctcaaccgggacgacctgggagcgcccaagacctgctactttggcggggtcctgcggtcgcgcatctccagtcagtgtatcaagcgcagcatccgcaccagcgagtcgttcaaggcattgtgtggcgggattcggacccgacaattggccaaactcattgccgacagagtggccggtaacgccgatgtaaagaagcgcgcggcaaagattctcaaggagtgtggcatcaatcccaaggatgagaacaagagcgacatgctggtctatacgactcagcaggccattgacgaaatggcgagtctcctggaaaacaacgcgaccgatgaattgctggctgaaaaattcgggaaattgatcggggaaagcacggccgttccggatatggcgcttagtgggcgaatgctggagacgggtgtcctgaaagacacgaccgtggaagccgccctttaggtggcccatgccatttcgacacacgaggcgcgtcccgaggtggactactacgtcgcggcggacgacatcccgggtgatgacgccggagcgggctatgtggacgaggctctgttttcttccgcctgtttctacaagtatttctcgattcattgggagacgctgacagccaacctgaaagggtatggagacgggtacgagcaactggccgcccacacggtaggcgctttcctgcgcggcgtggcgttcgccaatccgtccgggaaacagaacagttttgccgcccacaatcttcccgatgggatcctggttgaaatacggaattcatcccccgtcagttacgcgaacgcctttgcaagacctgtttccgggaatgatcagcgggatatcgtctcgcaaagcatggcgcagttgggtcagtacgctcacgatttggacgagggatatgggaagccgacacatcggttctggttttctccaaatcttcgttatccccttacaatttcggagaagaatcgggaagttcctttggcaaacgatgggaataatatcaagtcactcgacgcgttgatcccggcagtggtgaaaaccttgggttttgagtgggcgaaggttcaagaggaggttgtgacgccatgagcgttcagaccctctttcttcgcctggaaggccctctgcaggcgtggggcgatcaggagtcgaagttcggggtccggcgctcgggagaggccccgacgaaatccggagtcatcggtttgctttgcgccgctctgggtgtcccccgttccgaagccgccgacacgtggttgccgcgactcgcggccctgcgcatgggggtacgcatggatcgtcccggtgtccgcagttgggattatcacaccgtgggcgcagagatggaaatgcgtaccgccgaggggaaaaccaagtccggcgccatgctcacccggcgcgagtacctgggcgacgcctctttcctggtcgcgctccagggggaacccgctctgatcgccgaattgcgggacgcgctgagcgcccccaaatggacgctctatcttgggcgaaagtgttgcccgccgtcccggccgatactcgaacaagattttccggctggggagtatggcggcttgctcgaaaccctggcgtccgttccctggcgtccgcgtctcacggaagacgcgcgcccggcatcgctcgactgtctgctcgactgggttccgactgactccgaacccgaagcgcccgccgatgcccttgtctggtacgatgtgccgctgacgttcgatcccccgtctcaccgtccccgttttgtcgttcgcgcgcagttgactgcgagcaaagaggaagcgacagcgaaggagttcagggttcggattgaccgagtgccctcaccgtcttccgtcggcgcgcctccgcgtccccgcgccgactatacgaattccgagtatcggaagaaacgtcaggaacgcctcgatcacgaccgccatctgtgtgtcttctgcaagtcccgcgccaccacggtgcaacacatcacctatcgccacgccggggggggcgagcgcctggaagaactgcgcgcgctctgccgtctttgccacgacgccgtcacgatgatcgagtatggcctgggtatgggtctggaccgcatcaaccccgaggaagagcgctggcgcgagcagattatcaggaaacgcgaagaaatcatccagttccggtcgctcgaaacgcggcggcgcaaactcgccgcagaggaggtggaataatgtacctgtcgcaactcttgattgacgtgggcagcaaccccgaccgcccccgaccgggccgcgcctggctgcgcaacctgtaccatgtgcatcagcgcctctcgatggctttcccctcgcattcgcaactcgagggcgaccccttctttctgaaaccgttctctccggagggtttcctggggactcatgatgtcccggatgaatcgaaaagaaccctgttcctgtttcgcgttgactactcactgggggaaaactctccgcgtgttgtcattctggtacagtcggaggtaaaacccgattggaagtacgcgttccagaatgttccgatgttcctggccgctcggcctcagacgacagagtacaatcctcagttcgaagccggtcaagcccttcggtatcgcatctgcgtcaacctgagcaggaagaccgggacgggccgggacgcggaaggagtgaaggacctgcgccagtacaagtcggaaaaaaccgacgctcagggccgcccgaagtctcagggaaagcgcgtggcgtggacctggcccaaagaagagggcaaagacccccaggacttcatcctgccctggttttcagagaagggggcccgaaagggatttgcgttgggggacagccatttgatgcgtctcggttgggtcagtgggcagcgaccggggaacaagtcctccaatgaggaggatgacgtcaagcggcgcatgaaattccgctccgccctgctggagggacagttgacggtcactgacgcctcgctcttcggccagacccttgccctgggcattggatcggccaagtcgttcgggttcggactcttgagtgttgtacctgtaccggtgagtgtcgcaccttgaaccgcacgcccatcaacccgcaggacctgccgcgcttcagcgacaaactctcctacctctacgtcgaacacgccgtcgtggatcaggaggagcacgccattgctctctatcggcaggacggcatcagcctcatgccggtggccgcacttggagtgctcctcttgggaccgggcacgaaggtgacccatcaggcggttcattccctgtcagagaacgggtgcctggttctctggataggggaacacggcgtccgttactacgcccagggcatggggctggcgcgttcggcgcgcaatctccagcgccaggccagcctggcgagtcacccggtgacccgcctcaaggttgttgtccggatgtactgcaaacggttcaaggaaccgatggatccgggcatgacgctccagcagcttcggggccgggaagggatccgcgtccgtgaagcctacgcccacgccagcgccgagtatggcgtgccctggaatgggcgcagttacaagcgagactcttgggaaaatgccgatccggtcaaccgcgccctctcctgcgccaactcgtgcctctacggcctcgtgcatgccgccattctctgtggcgggtattccccggggcttgggttcatccactgcggaaagcaactctcgttcgtttacgacattgccgatctctacaaggaacatctgaccattcccgccgcgttccgcatcgcggcagagtcccccctcgatattgaaacgcggatccggcggacgctgcgcgatgtcttccggggagagaaactgatggaacgaattctcccggacatcgccagtgtcctgggaatgggccggaacgaacaggaacaagggctcgaagaatatggcgaagacgcggccttacccgccgaatggtgggccccctcagggttttcgcaggaaacccccatcggccagatcctggaagcttgcgtgggagactgactcatggtgatcctggtcctgcgcaaagccaaaccgggcctgaaaggctgggtgacacgctggttgagcgaagtcgcccccggggtctatctggggacggtttcctcccgggttcgagaccgtctctgggcccgcatcggcgaagaaatcgccgaaggggcagccgtcctcatctatccggctccgaccgaacaaggatacacaatccagaccgccgggaaaacctcctgcacctttgaagacttcgagggcttaatcctggccaaacggccggaatcgccgagaaaatcgctccagaatctgccatcctgatcaatccggctccgcccggacaagcatacgcaatccagccccccggaaaaaccgcgcgctccagactgccggaaaaagccctgttgcctcaaaataaaatgttaccgaaggcgggggtatgaggcagaataatttgtccttttggggacagacggcgggacgcgtggtcttggagaacgcgcgccccccgcttgtccttgggtccgggtagcaggccggctcccggacagaaccattgtggacttgtgcgggttcctttctcaagtgttttgaccgggcgcttgcctttggctggctggcacgccggcagatgggtcgcgcttcacggagaaattttgtggcgcgcgaatgtcttgcccggcaacggcgctcatacgcgcctggcgcaggatctctttcagtttgcgctcgatcgcctggtggagcgcgaagggatcgaggctctcgtactcgcggcgcagttgctgtttttcctcctcgctcaggtgcccgctggcgatcaaacgcgtgtaaggggtggccggggcgctgtggtgacgcacgaggcggccgccctcgcggctcttcgagaccaggcgcaccgtgggcaggaagaagttctgcagcgagcgccactcgcgggcgtacaggtcgttgatacgcgctacgaggcgcttgtcctcaagccggtcgtagccgaagagttgacggacgtgggtccactggcgctgctcgacgtgggcgttgtcgttcttgtggtaggggcggctgcgggtgaattcgaccggcgcggggcgctcgcgcaggaagcgcacaagcgcgtgggtgatgaactccgagccgttgtcgctgtcgaacccgagcagatcgaacggcagggtctgctcgatctcgcgcacacgcgccacaatctggcggtggtctttgttccacacggcgcggttctcggtccagccgctccagatgtcggtcaacgtcaggctccacacgaaggcgcccgcgagcgactggccgcagtgggccacggtgtcggcctcgatccagccgggcccgtccacctcctggaagcgggtgcggatggggatctgtccttgcaggcgggcggtcgagcaggtcgcgccgcgccccttgttcgcgcgaacgggggccaggaggcggtcgatcgtggccggactgatgcgttcgaggtcgcggcgaaccgccgcatcgagcgttccgaagcagcgttcgtaatggggcagccaggcgctcagaagcgccgccagacgcttcgagcaaggctggcccgccgccagccagatcgccttgagggtcttgagcagggtcttgtcgcggtaaagcgggggacgtccggctttgtcggtggggcgtcttcccgatgcgcttaaagcccggatcatggacttgcggtgcaggccgaagagggcgcatgcctcgtcgagaattcggcttttctcgctccgtgaggccttgcggtaacgcgctccctgggtgcggaaatactcctgacgcgagggataactcatgatttctcacatggcggactctccctggatgtctgtaacacccattttgagtcaaccatcccagtccacaccactcccaccctgaattgcggccaggcttcggtaacatacatatgaggcaattcgaagccgtgaaccgtcgaagacttcggggcttatttcttgcaaaattaccaaaatccccttactctttcagtgtattccccacgcacgtgggggtgaaccgtaacgcggaacaaactggttgtcatttcagccgtattccccacgcacgtgggggtgaaccgccttccacgggcttcagagccgcgtcgtaggcgtattccccacgcacgtgggggtgaaccgggagagaagaaaaatgtttgagattggcaagagtattccccacgcacgtgggggtgaaccgaatacaaactggtggaaatggagcaagaataagtattccccacgcacgtgggggtgaaccgccgcagaagcccgagcaaccaccggccaaggggtattccccacgcacgtgggggtgaaccggaaggggggtgcgcgggagatgactcgcaaaggt

SEQ ID NO: 1088 - DNA, 104204 bp, Artificial Sequence
  Synthetic Oligonucleotide
  misc_feature (1)..(95966): n is a, c, g, or t
nnnnnnnnnnnnnnnnnnnnnnnnnnnnnnnnnnnnnnnnnnnnnnnnnnnnnnnnnnnnnnnnnnnnnnnnnnnnnnnnnnnnnnnnnnnnnnnnnnnnnnnnnnnnnnnnnnnnnnnnnnnnnnnnnnnnnnnnnnnnnnnnnnnnnnnnnnnnnnnnnnnnnnnnnnnnnnnnnnnnnnnnnnnnnnnnnnnnnnnnnnnnnnnnnnnnnnnnnnnnnnnnnnnnnnnnnnnnnnnnnnnnnnnnnnnnnnnnnnnnnnnnnnnnnnnnnnnnnnnnnnnnnnnnnnnnnnnnnnnnnnnnnnnnnnnnnnnnnnnnnnnnnnnnnnnnnnnnnnnnnnnnnnnnnnnnnnnnnnnnnnnnnnnnnnnnnnnnnnnnnnnnnnnnnnnnnnnnnnnnnnnnnnnnnnnnnnnnnnnnnnnnnnnnnnnnnnnnnnnnnnnnnnnnnnnnnnnnnnnnnnnnnnnnnnnnnnnnnnnnnnnnnnnnnnnnnnnnnnnnnnnnnnnnnnnnnnnnnnnnnnnnnnnnnnnnnnnnnnnnnnnnnnnnnnnnnnnnnnnnnnnnnnnnnnnnnnnnnnnnnnnnnnnnnnnnnnnnnnnnnnnnnnnnnnnnnnnnnnnnnnnnnnnnnnnnnnnnnnnnnnnnnnnnnnnnnnnnnnnnnnnnnnnnnnnnnnnnnnnnnnnnnnnnnnnnnnnnnnnnnnnnnnnnnnnnnnnnnnnnnnnnnnnnnnnnnnnnnnnnnnnnnnnnnnnnnnnnnnnnnnnnnnnnnnnnnnnnnnnnnnnnnnnnnnnnnnnnnnnnnnnnnnnnnnnnnnnnnnnnnnnnnnnnnnnnnnnnnnnnnnnnnnnnnnnnnnnnnnnnnnnnnnnnnnnnnnnnnnnnnnnnnnnnnnnnnnnnnnnnnnnnnnnnnnnnnnnnnnnnnnnnnnnnnnnnnnnnnnnnnnnnnnnnnnnnnnnnnnnnnnnnnnnnnnnnnnnnnnnnnnnnnnnnnnnnnnnnnnnnnnnnnnnnnnnnnnnnnnnnnnnnnnnnnnnnnnnnnnnnnnnnnnnnnnnnnnnnnnnnnnnnnnnnnnnnnnnnnnnnnnnnnnnnnnnnnnnnnnnnnnnnnnnnnnnnnnnnnnnnnnnnnnnnnnnnnnnnnnnnnnnnnnnnnnnnnnnnnnnnnnnnnnnnnnnnnnnnnnnnnnnnnnnnnnnnnnnnnnnnnnnnnnnnnnnnnnnnnnnnnnnnnnnnnnnnnnnnnnnnnnnnnnnnnnnnnnnnnnnnnnnnnnnnnnnnnnnnnnnnnnnnnnnnnnnnnnnnnnnnnnnnnnnnnnnnnnnnnnnnnnnnnnnnnnnnnnnnnnnnnnnnnnnnnnnnnnnnnnnnnnnnnnnnnnnnnnnnnnnnnnnnnnnnnnnnnnnnnnnnnnnnnnnnnnnnnnnnnnnnnnnnnnnnnnnnnnnnnnnnnnnnnnnnnnnnnnnnnnnnnnnnnnnnnnnnnnnnnnnnnnnnnnnnnnnnnnnnnnnnnnnnnnnnnnnnnnnnnnnnnnnnnnnnnnnnnnnnnnnnnnnnnnnnnnnnnnnnnnnnnnnnnnnnnnnnnnnnnnnnnnnnnnnnnnnnnnnnnnnnnnnnnnnnnnnnnnnnnnnnnnnnnnnnnnnnnnnnnnnnnnnnnnnnnnnnnnnnnnnnnnnnnnnnnnnnnnnnnnnnnnnnnnnnnnnnnnnnnnnnnnnnnnnnnnnnnnnnnnnnnnnnnnnnnnnnnnnnnnnnnnnnnnnnnnnnnnnnnnnnnnnnnnnnnnnnnnnnnnnnnnnnnnnnnnnnnnnnnnnnnnnnnnnnnnnnnnnnnnnnnnnnnnnnnnnnnnnnnnnnnnnnnnnnnnnnnnnnnnnnnnnnnnnnnnnnnnnnnnnnnnnnnnnnnnnnnnnnnnnnnnnnnnnnnnnnnnnnnnnnnnnnnnnnnnnnnnnnnnnnnnnnnnnnnnnnnnnnnnnnnnnnnnnnnnnnnnnnnnnnnnnnnnnnnnnnnnnnnnnnnnnnnnnnnnnnnnnnnnnnnnnnnnnnnnnnnnnnnnnnnnnnnnnnnnnnnnnnnnnnnnnnnnnnnnnnnnnnnnnnnnnnnnnnnnnnnnnnnnnnnnnnnnnnnnnnnnnnnnnnnnnnnnnnnnnnnnnnnnnnnnnnnnnnnnnnnnnnnnnnnnnnnnnnnnnnnnnnnnnnnnnnnnnnnnnnnnnnnnnnnnnnnnnnnnnnnnnnnnnnnnnnnnnnnnnnnnnnnnnnnnnnnnnnnnnnnnnnnnnnnnnnnnnnnnnnnnnnnnnnnnnnnnnnnnnnnnnnnnnnnnnnnnnnnnnnnnnnnnnnnnnnnnnnnnnnnnnnnnnnnnnnnnnnnnnnnnnnnnnnnnnnnnnnnnnnnnnnnnnnnnnnnnnnnnnnnnnnnnnnnnnnnnnnnnnnnnnnnnnnnnnnnnnnnnnnnnnnnnnnnnnnnnnnnnnnnnnnnnnnnnnnnnnnnnnnnnnnnnnnnnnnnnnnnnnnnnnnnnnnnnnnnnnnnnnnnnnnnnnnnnnnnnnnnnnnnnnnnnnnnnnnnnnnnnnnnnnnnnnnnnnnnnnnnnnnnnnnnnnnnnnnnnnnnnnnnnnnnnnnnnnnnnnnnnnnnnnnnnnnnnnnnnnnnnnnnnnnnnnnnnnnnnnnnnnnnnnnnnnnnnnnnnnnnnnnnnnnnnnnnnnnnnnnnnnnnnnnnnnnnnnnnnnnnnnnnnnnnnnnnnnnnnnnnnnnnnnnnnnnnnnnnnnnnnnnnnnnnnnnnnnnnnnnnnnnnnnnnnnnnnnnnnnnnnnnnnnnnnnnnnnnnnnnnnnnnnnnnnnnnnnnnnnnnnnnnnnnnnnnnnnnnnnnnnnnnnnnnnnnnnnnnnnnnnnnnnnnnnnnnnnnnnnnnnnnnnnnnnnnnnnnnnnnnnnnnnnnnnnnnnnnnnnnnnnnnnnnnnnnnnnnnnnnnnnnnnnnnnnnnnnnnnnnnnnnnnnnnnnnnnnnnnnnnnnnnnnnnnnnnnnnnnnnnnnnnnnnnnnnnnnnnnnnnnnnnnnnnnnnnnnnnnnnnnnnnnnnnnnnnnnnnnnnnnnnnnnnnnnnnnnnnnnnnnnnnnnnnnnnnnnnnnnnnnnnnnnnnnnnnnnnnnnnnnnnnnnnnnnnnnnnnnnnnnnnnnnnnnnnnnnnnnnnnnnnnnnnnnnnnnnnnnnnnnnnnnnnnnnnnnnnnnnnnnnnnnnnnnnnnnnnnnnnnnnnnnnnnnnnnnnnnnnnnnnnnnnnnnnnnnnnnnnnnnnnnnnnnnnnnnnnnnnnnnnnnnnnnnnnnnnnnnnnnnnnnnnnnnnnnnnnnnnnnnnnnnnnnnnnnnnnnnnnnnnnnnnnnnnnnnnnnnnnnnnnnnnnnnnnnnnnnnnnnnnnnnnnnnnnnnnnnnnnnnnnnnnnnnnnnnnnnnnnnnnnnnnnnnnnnnnnnnnnnnnnnnnnnnnnnnnnnnnnnnnnnnnnnnnnnnnnnnnnnnnnnnnnnnnnnnnnnnnnnnnnnnnnnnnnnnnnnnnnnnnnnnnnnnnnnnnnnnnnnnnnnnnnnnnnnnnnnnnnnnnnnnnnnnnnnnnnnnnnnnnnnnnnnnnnnnnnnnnnnnnnnnnnnnnnnnnnnnnnnnnnnnnnnnnnnnnnnnnnnnnnnnnnnnnnnnnnnnnnnnnnnnnnnnnnnnnnnnnnnnnnnnnnnnnnnnnnnnnnnnnnnnnnnnnnnnnnnnnnnnnnnnnnnnnnnnnnnnnnnnnnnnnnnnnnnnnnnnnnnnnnnnnnnnnnnnnnnnnnnnnnnnnnnnnnnnnnnnnnnnnnnnnnnnnnnnnnnnnnnnnnnnnnnnnnnnnnnnnnnnnnnnnnnnnnnnnnnnnnnnnnnnnnnnnnnnnnnnnnnnnnnnnnnnnnnnnnnnnnnnnnnnnnnnnnnnnnnnnnnnnnnnnnnnnnnnnnnnnnnnnnnnnnnnnnnnnnnnnnnnnnnnnnnnnnnnnnnnnnnnnnnnnnnnnnnnnnnnnnnnnnnnnnnnnnnnnnnnnnnnnnnnnnnnnnnnnnnnnnnnnnnnnnnnnnnnnnnnnnnnnnnnnnnnnnnnnnnnnnnnnnnnnnnnnnnnnnnnnnnnnnnnnnnnnnnnnnnnnnnnnnnnnnnnnnnnnnnnnnnnnnnnnnnnnnnnnnnnnnnnnnnnnnnnnnnnnnnnnnnnnnnnnnnnnnnnnnnnnnnnnnnnnnnnnnnnnnnnnnnnnnnnnnnnnnnnnnnnnnnnnnnnnnnnnnnnnnnnnnnnnnnnnnnnnnnnnnnnnnnnnnnnnnnnnnnnnnnnnnnnnnnnnnnnnnnnnnnnnnnnnnnnnnnnnnnnnnnnnnnnnnnnnnnnnnnnnnnnnnnnnnnnnnnnnnnnnnnnnnnnnnnnnnnnnnnnnnnnnnnnnnnnnnnnnnnnnnnnnnnnnnnnnnnnnnnnnnnnnnnnnnnnnnnnnnnnnnnnnnnnnnnnnnnnnnnnnnnnnnnnnnnnnnnnnnnnnnnnnnnnnnnnnnnnnnnnnnnnnnnnnnnnnnnnnnnnnnnnnnnnnnnnnnnnnnnnnnnnnnnnnnnnnnnnnnnnnnnnnnnnnnnnnnnnnnnnnnnnnnnnnnnnnnnnnnnnnnnnnnnnnnnnnnnnnnnnnnnnnnnnnnnnnnnnnnnnnnnnnnnnnnnnnnnnnnnnnnnnnnnnnnnnnnnnnnnnnnnnnnnnnnnnnnnnnnnnnnnnnnnnnnnnnnnnnnnnnnnnnnnnnnnnnnnnnnnnnnnnnnnnnnnnnnnnnnnnnnnnnnnnnnnnnnnnnnnnnnnnnnnnnnnnnnnnnnnnnnnnnnnnnnnnnnnnnnnnnnnnnnnnnnnnnnnnnnnnnnnnnnnnnnnnnnnnnnnnnnnnnnnnnnnnnnnnnnnnnnnnnnnnnnnnnnnnnnnnnnnnnnnnnnnnnnnnnnnnnnnnnnnnnnnnnnnnnnnnnnnnnnnnnnnnnnnnnnnnnnnnnnnnnnnnnnnnnnnnnnnnnnnnnnnnnnnnnnnnnnnnnnnnnnnnnnnnnnnnnnnnnnnnnnnnnnnnnnnnnnnnnnnnnnnnnnnnnnnnnnnnnnnnnnnnnnnnnnnnnnnnnnnnnnnnnnnnnnnnnnnnnnnnnnnnnnnnnnnnnnnnnnnnnnnnnnnnnnnnnnnnnnnnnnnnnnnnnnnnnnnnnnnnnnnnnnnnnnnnnnnnnnnnnnnnnnnnnnnnnnnnnnnnnnnnnnnnnnnnnnnnnnnnnnnnnnnnnnnnnnnnnnnnnnnnnnnnnnnnnnnnnnnnnnnnnnnnnnnnnnnnnnnnnnnnnnnnnnnnnnnnnnnnnnnnnnnnnnnnnnnnnnnnnnnnnnnnnnnnnnnnnnnnnnnnnnnnnnnnnnnnnnnnnnnnnnnnnnnnnnnnnnnnnnnnnnnnnnnnnnnnnnnnnnnnnnnnnnnnnnnnnnnnnnnnnnnnnnnnnnnnnnnnnnnnnnnnnnnnnnnnnnnnnnnnnnnnnnnnnnnnnnnnnnnnnnnnnnnnnnnnnnnnnnnnnnnnnnnnnnnnnnnnnnnnnnnnnnnnnnnnnnnnnnnnnnnnnnnnnnnnnnnnnnnnnnnnnnnnnnnnnnnnnnnnnnnnnnnnnnnnnnnnnnnnnnnnnnnnnnnnnnnnnnnnnnnnnnnnnnnnnnnnnnnnnnnnnnnnnnnnnnnnnnnnnnnnnnnnnnnnnnnnnnnnnnnnnnnnnnnnnnnnnnnnnnnnnnnnnnnnnnnnnnnnnnnnnnnnnnnnnnnnnnnnnnnnnnnnnnnnnnnnnnnnnnnnnnnnnnnnnnnnnnnnnnnnnnnnnnnnnnnnnnnnnnnnnnnnnnnnnnnnnnnnnnnnnnnnnnnnnnnnnnnnnnnnnnnnnnnnnnnnnnnnnnnnnnnnnnnnnnnnnnnnnnnnnnnnnnnnnnnnnnnnnnnnnnnnnnnnnnnnnnnnnnnnnnnnnnnnnnnnnnnnnnnnnnnnnnnnnnnnnnnnnnnnnnnnnnnnnnnnnnnnnnnnnnnnnnnnnnnnnnnnnnnnnnnnnnnnnnnnnnnnnnnnnnnnnnnnnnnnnnnnnnnnnnnnnnnnnnnnnnnnnnnnnnnnnnnnnnnnnnnnnnnnnnnnnnnnnnnnnnnnnnnnnnnnnnnnnnnnnnnnnnnnnnnnnnnnnnnnnnnnnnnnnnnnnnnnnnnnnnnnnnnnnnnnnnnnnnnnnnnnnnnnnnnnnnnnnnnnnnnnnnnnnnnnnnnnnnnnnnnnnnnnnnnnnnnnnnnnnnnnnnnnnnnnnnnnnnnnnnnnnnnnnnnnnnnnnnnnnnnnnnnnnnnnnnnnnnnnnnnnnnnnnnnnnnnnnnnnnnnnnnnnnnnnnnnnnnnnnnnnnnnnnnnnnnnnnnnnnnnnnnnnnnnnnnnnnnnnnnnnnnnnnnnnnnnnnnnnnnnnnnnnnnnnnnnnnnnnnnnnnnnnnnnnnnnnnnnnnnnnnnnnnnnnnnnnnnnnnnnnnnnnnnnnnnnnnnnnnnnnnnnnnnnnnnnnnnnnnnnnnnnnnnnnnnnnnnnnnnnnnnnnnnnnnnnnnnnnnnnnnnnnnnnnnnnnnnnnnnnnnnnnnnnnnnnnnnnnnnnnnnnnnnnnnnnnnnnnnnnnnnnnnnnnnnnnnnnnnnnnnnnnnnnnnnnnnnnnnnnnnnnnnnnnnnnnnnnnnnnnnnnnnnnnnnnnnnnnnnnnnnnnnnnnnnnnnnnnnnnnnnnnnnnnnnnnnnnnnnnnnnnnnnnnnnnnnnnnnnnnnnnnnnnnnnnnnnnnnnnnnnnnnnnnnnnnnnnnnnnnnnnnnnnnnnnnnnnnnnnnnnnnnnnnnnnnnnnnnnnnnnnnnnnnnnnnnnnnnnnnnnnnnnnnnnnnnnnnnnnnnnnnnnnnnnnnnnnnnnnnnnnnnnnnnnnnnnnnnnnnnnnnnnnnnnnnnnnnnnnnnnnnnnnnnnnnnnnnnnnnnnnnnnnnnnnnnnnnnnnnnnnnnnnnnnnnnnnnnnnnnnnnnnnnnnnnnnnnnnnnnnnnnnnnnnnnnnnnnnnnnnnnnnnnnnnnnnnnnnnnnnnnnnnnnnnnnnnnnnnnnnnnnnnnnnnnnnnnnnnnnnnnnnnnnnnnnnnnnnnnnnnnnnnnnnnnnnnnnnnnnnnnnnnnnnnnnnnnnnnnnnnnnnnnnnnnnnnnnnnnnnnnnnnnnnnnnnnnnnnnnnnnnnnnnnnnnnnnnnnnnnnnnnnnnnnnnnnnnnnnnnnnnnnnnnnnnnnnnnnnnnnnnnnnnnnnnnnnnnnnnnnnnnnnnnnnnnnnnnnnnnnnnnnnnnnnnnnnnnnnnnnnnnnnnnnnnnnnnnnnnnnnnnnnnnnnnnnnnnnnnnnnnnnnnnnnnnnnnnnnnnnnnnnnnnnnnnnnnnnnnnnnnnnnnnnnnnnnnnnnnnnnnnnnnnnnnnnnnnnnnnnnnnnnnnnnnnnnnnnnnnnnnnnnnnnnnnnnnnnnnnnnnnnnnnnnnnnnnnnnnnnnnnnnnnnnnnnnnnnnnnnnnnnnnnnnnnnnnnnnnnnnnnnnnnnnnnnnnnnnnnnnnnnnnnnnnnnnnnnnnnnnnnnnnnnnnnnnnnnnnnnnnnnnnnnnnnnnnnnnnnnnnnnnnnnnnnnnnnnnnnnnnnnnnnnnnnnnnnnnnnnnnnnnnnnnnnnnnnnnnnnnnnnnnnnnnnnnnnnnnnnnnnnnnnnnnnnnnnnnnnnnnnnnnnnnnnnnnnnnnnnnnnnnnnnnnnnnnnnnnnnnnnnnnnnnnnnnnnnnnnnnnnnnnnnnnnnnnnnnnnnnnnnnnnnnnnnnnnnnnnnnnnnnnnnnnnnnnnnnnnnnnnnnnnnnnnnnnnnnnnnnnnnnnnnnnnnnnnnnnnnnnnnnnnnnnnnnnnnnnnnnnnnnnnnnnnnnnnnnnnnnnnnnnnnnnnnnnnnnnnnnnnnnnnnnnnnnnnnnnnnnnnnnnnnnnnnnnnnnnnnnnnnnnnnnnnnnnnnnnnnnnnnnnnnnnnnnnnnnnnnnnnnnnnnnnnnnnnnnnnnnnnnnnnnnnnnnnnnnnnnnnnnnnnnnnnnnnnnnnnnnnnnnnnnnnnnnnnnnnnnnnnnnnnnnnnnnnnnnnnnnnnnnnnnnnnnnnnnnnnnnnnnnnnnnnnnnnnnnnnnnnnnnnnnnnnnnnnnnnnnnnnnnnnnnnnnnnnnnnnnnnnnnnnnnnnnnnnnnnnnnnnnnnnnnnnnnnnnnnnnnnnnnnnnnnnnnnnnnnnnnnnnnnnnnnnnnnnnnnnnnnnnnnnnnnnnnnnnnnnnnnnnnnnnnnnnnnnnnnnnnnnnnnnnnnnnnnnnnnnnnnnnnnnnnnnnnnnnnnnnnnnnnnnnnnnnnnnnnnnnnnnnnnnnnnnnnnnnnnnnnnnnnnnnnnnnnnnnnnnnnnnnnnnnnnnnnnnnnnnnnnnnnnnnnnnnnnnnnnnnnnnnnnnnnnnnnnnnnnnnnnnnnnnnnnnnnnnnnnnnnnnnnnnnnnnnnnnnnnnnnnnnnnnnnnnnnnnnnnnnnnnnnnnnnnnnnnnnnnnnnnnnnnnnnnnnnnnnnnnnnnnnnnnnnnnnnnnnnnnnnnnnnnnnnnnnnnnnnnnnnnnnnnnnnnnnnnnnnnnnnnnnnnnnnnnnnnnnnnnnnnnnnnnnnnnnnnnnnnnnnnnnnnnnnnnnnnnnnnnnnnnnnnnnnnnnnnnnnnnnnnnnnnnnnnnnnnnnnnnnnnnnnnnnnnnnnnnnnnnnnnnnnnnnnnnnnnnnnnnnnnnnnnnnnnnnnnnnnnnnnnnnnnnnnnnnnnnnnnnnnnnnnnnnnnnnnnnnnnnnnnnnnnnnnnnnnnnnnnnnnnnnnnnnnnnnnnnnnnnnnnnnnnnnnnnnnnnnnnnnnnnnnnnnnnnnnnnnnnnnnnnnnnnnnnnnnnnnnnnnnnnnnnnnnnnnnnnnnnnnnnnnnnnnnnnnnnnnnnnnnnnnnnnnnnnnnnnnnnnnnnnnnnnnnnnnnnnnnnnnnnnnnnnnnnnnnnnnnnnnnnnnnnnnnnnnnnnnnnnnnnnnnnnnnnnnnnnnnnnnnnnnnnnnnnnnnnnnnnnnnnnnnnnnnnnnnnnnnnnnnnnnnnnnnnnnnnnnnnnnnnnnnnnnnnnnnnnnnnnnnnnnnnnnnnnnnnnnnnnnnnnnnnnnnnnnnnnnnnnnnnnnnnnnnnnnnnnnnnnnnnnnnnnnnnnnnnnnnnnnnnnnnnnnnnnnnnnnnnnnnnnnnnnnnnnnnnnnnnnnnnnnnnnnnnnnnnnnnnnnnnnnnnnnnnnnnnnnnnnnnnnnnnnnnnnnnnnnnnnnnnnnnnnnnnnnnnnnnnnnnnnnnnnnnnnnnnnnnnnnnnnnnnnnnnnnnnnnnnnnnnnnnnnnnnnnnnnnnnnnnnnnnnnnnnnnnnnnnnnnnnnnnnnnnnnnnnnnnnnnnnnnnnnnnnnnnnnnnnnnnnnnnnnnnnnnnnnnnnnnnnnnnnnnnnnnnnnnnnnnnnnnnnnnnnnnnnnnnnnnnnnnnnnnnnnnnnnnnnnnnnnnnnnnnnnnnnnnnnnnnnnnnnnnnnnnnnnnnnnnnnnnnnnnnnnnnnnnnnnnnnnnnnnnnnnnnnnnnnnnnnnnnnnnnnnnnnnnnnnnnnnnnnnnnnnnnnnnnnnnnnnnnnnnnnnnnnnnnnnnnnnnnnnnnnnnnnnnnnnnnnnnnnnnnnnnnnnnnnnnnnnnnnnnnnnnnnnnnnnnnnnnnnnnnnnnnnnnnnnnnnnnnnnnnnnnnnnnnnnnnnnnnnnnnnnnnnnnnnnnnnnnnnnnnnnnnnnnnnnnnnnnnnnnnnnnnnnnnnnnnnnnnnnnnnnnnnnnnnnnnnnnnnnnnnnnnnnnnnnnnnnnnnnnnnnnnnnnnnnnnnnnnnnnnnnnnnnnnnnnnnnnnnnnnnnnnnnnnnnnnnnnnnnnnnnnnnnnnnnnnnnnnnnnnnnnnnnnnnnnnnnnnnnnnnnnnnnnnnnnnnnnnnnnnnnnnnnnnnnnnnnnnnnnnnnnnnnnnnnnnnnnnnnnnnnnnnnnnnnnnnnnnnnnnnnnnnnnnnnnnnnnnnnnnnnnnnnnnnnnnnnnnnnnnnnnnnnnnnnnnnnnnnnnnnnnnnnnnnnnnnnnnnnnnnnnnnnnnnnnnnnnnnnnnnnnnnnnnnnnnnnnnnnnnnnnnnnnnnnnnnnnnnnnnnnnnnnnnnnnnnnnnnnnnnnnnnnnnnnnnnnnnnnnnnnnnnnnnnnnnnnnnnnnnnnnnnnnnnnnnnnnnnnnnnnnnnnnnnnnnnnnnnnnnnnnnnnnnnnnnnnnnnnnnnnnnnnnnnnnnnnnnnnnnnnnnnnnnnnnnnnnnnnnnnnnnnnnnnnnnnnnnnnnnnnnnnnnnnnnnnnnnnnnnnnnnnnnnnnnnnnnnnnnnnnnnnnnnnnnnnnnnnnnnnnnnnnnnnnnnnnnnnnnnnnnnnnnnnnnnnnnnnnnnnnnnnnnnnnnnnnnnnnnnnnnnnnnnnnnnnnnnnnnnnnnnnnnnnnnnnnnnnnnnnnnnnnnnnnnnnnnnnnnnnnnnnnnnnnnnnnnnnnnnnnnnnnnnnnnnnnnnnnnnnnnnnnnnnnnnnnnnnnnnnnnnnnnnnnnnnnnnnnnnnnnnnnnnnnnnnnnnnnnnnnnnnnnnnnnnnnnnnnnnnnnnnnnnnnnnnnnnnnnnnnnnnnnnnnnnnnnnnnnnnnnnnnnnnnnnnnnnnnnnnnnnnnnnnnnnnnnnnnnnnnnnnnnnnnnnnnnnnnnnnnnnnnnnnnnnnnnnnnnnnnnnnnnnnnnnnnnnnnnnnnnnnnnnnnnnnnnnnnnnnnnnnnnnnnnnnnnnnnnnnnnnnnnnnnnnnnnnnnnnnnnnnnnnnnnnnnnnnnnnnnnnnnnnnnnnnnnnnnnnnnnnnnnnnnnnnnnnnnnnnnnnnnnnnnnnnnnnnnnnnnnnnnnnnnnnnnnnnnnnnnnnnnnnnnnnnnnnnnnnnnnnnnnnnnnnnnnnnnnnnnnnnnnnnnnnnnnnnnnnnnnnnnnnnnnnnnnnnnnnnnnnnnnnnnnnnnnnnnnnnnnnnnnnnnnnnnnnnnnnnnnnnnnnnnnnnnnnnnnnnnnnnnnnnnnnnnnnnnnnnnnnnnnnnnnnnnnnnnnnnnnnnnnnnnnnnnnnnnnnnnnnnnnnnnnnnnnnnnnnnnnnnnnnnnnnnnnnnnnnnnnnnnnnnnnnnnnnnnnnnnnnnnnnnnnnnnnnnnnnnnnnnnnnnnnnnnnnnnnnnnnnnnnnnnnnnnnnnnnnnnnnnnnnnnnnnnnnnnnnnnnnnnnnnnnnnnnnnnnnnnnnnnnnnnnnnnnnnnnnnnnnnnnnnnnnnnnnnnnnnnnnnnnnnnnnnnnnnnnnnnnnnnnnnnnnnnnnnnnnnnnnnnnnnnnnnnnnnnnnnnnnnnnnnnnnnnnnnnnnnnnnnnnnnnnnnnnnnnnnnnnnnnnnnnnnnnnnnnnnnnnnnnnnnnnnnnnnnnnnnnnnnnnnnnnnnnnnnnnnnnnnnnnnnnnnnnnnnnnnnnnnnnnnnnnnnnnnnnnnnnnnnnnnnnnnnnnnnnnnnnnnnnnnnnnnnnnnnnnnnnnnnnnnnnnnnnnnnnnnnnnnnnnnnnnnnnnnnnnnnnnnnnnnnnnnnnnnnnnnnnnnnnnnnnnnnnnnnnnnnnnnnnnnnnnnnnnnnnnnnnnnnnnnnnnnnnnnnnnnnnnnnnnnnnnnnnnnnnnnnnnnnnnnnnnnnnnnnnnnnnnnnnnnnnnnnnnnnnnnnnnnnnnnnnnnnnnnnnnnnnnnnnnnnnnnnnnnnnnnnnnnnnnnnnnnnnnnnnnnnnnnnnnnnnnnnnnnnnnnnnnnnnnnnnnnnnnnnnnnnnnnnnnnnnnnnnnnnnnnnnnnnnnnnnnnnnnnnnnnnnnnnnnnnnnnnnnnnnnnnnnnnnnnnnnnnnnnnnnnnnnnnnnnnnnnnnnnnnnnnnnnnnnnnnnnnnnnnnnnnnnnnnnnnnnnnnnnnnnnnnnnnnnnnnnnnnnnnnnnnnnnnnnnnnnnnnnnnnnnnnnnnnnnnnnnnnnnnnnnnnnnnnnnnnnnnnnnnnnnnnnnnnnnnnnnnnnnnnnnnnnnnnnnnnnnnnnnnnnnnnnnnnnnnnnnnnnnnnnnnnnnnnnnnnnnnnnnnnnnnnnnnnnnnnnnnnnnnnnnnnnnnnnnnnnnnnnnnnnnnnnnnnnnnnnnnnnnnnnnnnnnnnnnnnnnnnnnnnnnnnnnnnnnnnnnnnnnnnnnnnnnnnnnnnnnnnnnnnnnnnnnnnnnnnnnnnnnnnnnnnnnnnnnnnnnnnnnnnnnnnnnnnnnnnnnnnnnnnnnnnnnnnnnnnnnnnnnnnnnnnnnnnnnnnnnnnnnnnnnnnnnnnnnnnnnnnnnnnnnnnnnnnnnnnnnnnnnnnnnnnnnnnnnnnnnnnnnnnnnnnnnnnnnnnnnnnnnnnnnnnnnnnnnnnnnnnnnnnnnnnnnnnnnnnnnnnnnnnnnnnnnnnnnnnnnnnnnnnnnnnnnnnnnnnnnnnnnnnnnnnnnnnnnnnnnnnnnnnnnnnnnnnnnnnnnnnnnnnnnnnnnnnnnnnnnnnnnnnnnnnnnnnnnnnnnnnnnnnnnnnnnnnnnnnnnnnnnnnnnnnnnnnnnnnnnnnnnnnnnnnnnnnnnnnnnnnnnnnnnnnnnnnnnnnnnnnnnnnnnnnnnnnnnnnnnnnnnnnnnnnnnnnnnnnnnnnnnnnnnnnnnnnnnnnnnnnnnnnnnnnnnnnnnnnnnnnnnnnnnnnnnnnnnnnnnnnnnnnnnnnnnnnnnnnnnnnnnnnnnnnnnnnnnnnnnnnnnnnnnnnnnnnnnnnnnnnnnnnnnnnnnnnnnnnnnnnnnnnnnnnnnnnnnnnnnnnnnnnnnnnnnnnnnnnnnnnnnnnnnnnnnnnnnnnnnnnnnnnnnnnnnnnnnnnnnnnnnnnnnnnnnnnnnnnnnnnnnnnnnnnnnnnnnnnnnnnnnnnnnnnnnnnnnnnnnnnnnnnnnnnnnnnnnnnnnnnnnnnnnnnnnnnnnnnnnnnnnnnnnnnnnnnnnnnnnnnnnnnnnnnnnnnnnnnnnnnnnnnnnnnnnnnnnnnnnnnnnnnnnnnnnnnnnnnnnnnnnnnnnnnnnnnnnnnnnnnnnnnnnnnnnnnnnnnnnnnnnnnnnnnnnnnnnnnnnnnnnnnnnnnnnnnnnnnnnnnnnnnnnnnnnnnnnnnnnnnnnnnnnnnnnnnnnnnnnnnnnnnnnnnnnnnnnnnnnnnnnnnnnnnnnnnnnnnnnnnnnnnnnnnnnnnnnnnnnnnnnnnnnnnnnnnnnnnnnnnnnnnnnnnnnnnnnnnnnnnnnnnnnnnnnnnnnnnnnnnnnnnnnnnnnnnnnnnnnnnnnnnnnnnnnnnnnnnnnnnnnnnnnnnnnnnnnnnnnnnnnnnnnnnnnnnnnnnnnnnnnnnnnnnnnnnnnnnnnnnnnnnnnnnnnnnnnnnnnnnnnnnnnnnnnnnnnnnnnnnnnnnnnnnnnnnnnnnnnnnnnnnnnnnnnnnnnnnnnnnnnnnnnnnnnnnnnnnnnnnnnnnnnnnnnnnnnnnnnnnnnnnnnnnnnnnnnnnnnnnnnnnnnnnnnnnnnnnnnnnnnnnnnnnnnnnnnnnnnnnnnnnnnnnnnnnnnnnnnnnnnnnnnnnnnnnnnnnnnnnnnnnnnnnnnnnnnnnnnnnnnnnnnnnnnnnnnnnnnnnnnnnnnnnnnnnnnnnnnnnnnnnnnnnnnnnnnnnnnnnnnnnnnnnnnnnnnnnnnnnnnnnnnnnnnnnnnnnnnnnnnnnnnnnnnnnnnnnnnnnnnnnnnnnnnnnnnnnnnnnnnnnnnnnnnnnnnnnnnnnnnnnnnnnnnnnnnnnnnnnnnnnnnnnnnnnnnnnnnnnnnnnnnnnnnnnnnnnnnnnnnnnnnnnnnnnnnnnnnnnnnnnnnnnnnnnnnnnnnnnnnnnnnnnnnnnnnnnnnnnnnnnnnnnnnnnnnnnnnnnnnnnnnnnnnnnnnnnnnnnnnnnnnnnnnnnnnnnnnnnnnnnnnnnnnnnnnnnnnnnnnnnnnnnnnnnnnnnnnnnnnnnnnnnnnnnnnnnnnnnnnnnnnnnnnnnnnnnnnnnnnnnnnnnnnnnnnnnnnnnnnnnnnnnnnnnnnnnnnnnnnnnnnnnnnnnnnnnnnnnnnnnnnnnnnnnnnnnnnnnnnnnnnnnnnnnnnnnnnnnnnnnnnnnnnnnnnnnnnnnnnnnnnnnnnnnnnnnnnnnnnnnnnnnnnnnnnnnnnnnnnnnnnnnnnnnnnnnnnnnnnnnnnnnnnnnnnnnnnnnnnnnnnnnnnnnnnnnnnnnnnnnnnnnnnnnnnnnnnnnnnnnnnnnnnnnnnnnnnnnnnnnnnnnnnnnnnnnnnnnnnnnnnnnnnnnnnnnnnnnnnnnnnnnnnnnnnnnnnnnnnnnnnnnnnnnnnnnnnnnnnnnnnnnnnnnnnnnnnnnnnnnnnnnnnnnnnnnnnnnnnnnnnnnnnnnnnnnnnnnnnnnnnnnnnnnnnnnnnnnnnnnnnnnnnnnnnnnnnnnnnnnnnnnnnnnnnnnnnnnnnnnnnnnnnnnnnnnnnnnnnnnnnnnnnnnnnnnnnnnnnnnnnnnnnnnnnnnnnnnnnnnnnnnnnnnnnnnnnnnnnnnnnnnnnnnnnnnnnnnnnnnnnnnnnnnnnnnnnnnnnnnnnnnnnnnnnnnnnnnnnnnnnnnnnnnnnnnnnnnnnnnnnnnnnnnnnnnnnnnnnnnnnnnnnnnnnnnnnnnnnnnnnnnnnnnnnnnnnnnnnnnnnnnnnnnnnnnnnnnnnnnnnnnnnnnnnnnnnnnnnnnnnnnnnnnnnnnnnnnnnnnnnnnnnnnnnnnnnnnnnnnnnnnnnnnnnnnnnnnnnnnnnnnnnnnnnnnnnnnnnnnnnnnnnnnnnnnnnnnnnnnnnnnnnnnnnnnnnnnnnnnnnnnnnnnnnnnnnnnnnnnnnnnnnnnnnnnnnnnnnnnnnnnnnnnnnnnnnnnnnnnnnnnnnnnnnnnnnnnnnnnnnnnnnnnnnnnnnnnnnnnnnnnnnnnnnnnnnnnnnnnnnnnnnnnnnnnnnnnnnnnnnnnnnnnnnnnnnnnnnnnnnnnnnnnnnnnnnnnnnnnnnnnnnnnnnnnnnnnnnnnnnnnnnnnnnnnnnnnnnnnnnnnnnnnnnnnnnnnnnnnnnnnnnnnnnnnnnnnnnnnnnnnnnnnnnnnnnnnnnnnnnnnnnnnnnnnnnnnnnnnnnnnnnnnnnnnnnnnnnnnnnnnnnnnnnnnnnnnnnnnnnnnnnnnnnnnnnnnnnnnnnnnnnnnnnnnnnnnnnnnnnnnnnnnnnnnnnnnnnnnnnnnnnnnnnnnnnnnnnnnnnnnnnnnnnnnnnnnnnnnnnnnnnnnnnnnnnnnnnnnnnnnnnnnnnnnnnnnnnnnnnnnnnnnnnnnnnnnnnnnnnnnnnnnnnnnnnnnnnnnnnnnnnnnnnnnnnnnnnnnnnnnnnnnnnnnnnnnnnnnnnnnnnnnnnnnnnnnnnnnnnnnnnnnnnnnnnnnnnnnnnnnnnnnnnnnnnnnnnnnnnnnnnnnnnnnnnnnnnnnnnnnnnnnnnnnnnnnnnnnnnnnnnnnnnnnnnnnnnnnnnnnnnnnnnnnnnnnnnnnnnnnnnnnnnnnnnnnnnnnnnnnnnnnnnnnnnnnnnnnnnnnnnnnnnnnnnnnnnnnnnnnnnnnnnnnnnnnnnnnnnnnnnnnnnnnnnnnnnnnnnnnnnnnnnnnnnnnnnnnnnnnnnnnnnnnnnnnnnnnnnnnnnnnnnnnnnnnnnnnnnnnnnnnnnnnnnnnnnnnnnnnnnnnnnnnnnnnnnnnnnnnnnnnnnnnnnnnnnnnnnnnnnnnnnnnnnnnnnnnnnnnnnnnnnnnnnnnnnnnnnnnnnnnnnnnnnnnnnnnnnnnnnnnnnnnnnnnnnnnnnnnnnnnnnnnnnnnnnnnnnnnnnnnnnnnnnnnnnnnnnnnnnnnnnnnnnnnnnnnnnnnnnnnnnnnnnnnnnnnnnnnnnnnnnnnnnnnnnnnnnnnnnnnnnnnnnnnnnnnnnnnnnnnnnnnnnnnnnnnnnnnnnnnnnnnnnnnnnnnnnnnnnnnnnnnnnnnnnnnnnnnnnnnnnnnnnnnnnnnnnnnnnnnnnnnnnnnnnnnnnnnnnnnnnnnnnnnnnnnnnnnnnnnnnnnnnnnnnnnnnnnnnnnnnnnnnnnnnnnnnnnnnnnnnnnnnnnnnnnnnnnnnnnnnnnnnnnnnnnnnnnnnnnnnnnnnnnnnnnnnnnnnnnnnnnnnnnnnnnnnnnnnnnnnnnnnnnnnnnnnnnnnnnnnnnnnnnnnnnnnnnnnnnnnnnnnnnnnnnnnnnnnnnnnnnnnnnnnnnnnnnnnnnnnnnnnnnnnnnnnnnnnnnnnnnnnnnnnnnnnnnnnnnnnnnnnnnnnnnnnnnnnnnnnnnnnnnnnnnnnnnnnnnnnnnnnnnnnnnnnnnnnnnnnnnnnnnnnnnnnnnnnnnnnnnnnnnnnnnnnnnnnnnnnnnnnnnnnnnnnnnnnnnnnnnnnnnnnnnnnnnnnnnnnnnnnnnnnnnnnnnnnnnnnnnnnnnnnnnnnnnnnnnnnnnnnnnnnnnnnnnnnnnnnnnnnnnnnnnnnnnnnnnnnnnnnnnnnnnnnnnnnnnnnnnnnnnnnnnnnnnnnnnnnnnnnnnnnnnnnnnnnnnnnnnnnnnnnnnnnnnnnnnnnnnnnnnnnnnnnnnnnnnnnnnnnnnnnnnnnnnnnnnnnnnnnnnnnnnnnnnnnnnnnnnnnnnnnnnnnnnnnnnnnnnnnnnnnnnnnnnnnnnnnnnnnnnnnnnnnnnnnnnnnnnnnnnnnnnnnnnnnnnnnnnnnnnnnnnnnnnnnnnnnnnnnnnnnnnnnnnnnnnnnnnnnnnnnnnnnnnnnnnnnnnnnnnnnnnnnnnnnnnnnnnnnnnnnnnnnnnnnnnnnnnnnnnnnnnnnnnnnnnnnnnnnnnnnnnnnnnnnnnnnnnnnnnnnnnnnnnnnnnnnnnnnnnnnnnnnnnnnnnnnnnnnnnnnnnnnnnnnnnnnnnnnnnnnnnnnnnnnnnnnnnnnnnnnnnnnnnnnnnnnnnnnnnnnnnnnnnnnnnnnnnnnnnnnnnnnnnnnnnnnnnnnnnnnnnnnnnnnnnnnnnnnnnnnnnnnnnnnnnnnnnnnnnnnnnnnnnnnnnnnnnnnnnnnnnnnnnnnnnnnnnnnnnnnnnnnnnnnnnnnnnnnnnnnnnnnnnnnnnnnnnnnnnnnnnnnnnnnnnnnnnnnnnnnnnnnnnnnnnnnnnnnnnnnnnnnnnnnnnnnnnnnnnnnnnnnnnnnnnnnnnnnnnnnnnnnnnnnnnnnnnnnnnnnnnnnnnnnnnnnnnnnnnnnnnnnnnnnnnnnnnnnnnnnnnnnnnnnnnnnnnnnnnnnnnnnnnnnnnnnnnnnnnnnnnnnnnnnnnnnnnnnnnnnnnnnnnnnnnnnnnnnnnnnnnnnnnnnnnnnnnnnnnnnnnnnnnnnnnnnnnnnnnnnnnnnnnnnnnnnnnnnnnnnnnnnnnnnnnnnnnnnnnnnnnnnnnnnnnnnnnnnnnnnnnnnnnnnnnnnnnnnnnnnnnnnnnnnnnnnnnnnnnnnnnnnnnnnnnnnnnnnnnnnnnnnnnnnnnnnnnnnnnnnnnnnnnnnnnnnnnnnnnnnnnnnnnnnnnnnnnnnnnnnnnnnnnnnnnnnnnnnnnnnnnnnnnnnnnnnnnnnnnnnnnnnnnnnnnnnnnnnnnnnnnnnnnnnnnnnnnnnnnnnnnnnnnnnnnnnnnnnnnnnnnnnnnnnnnnnnnnnnnnnnnnnnnnnnnnnnnnnnnnnnnnnnnnnnnnnnnnnnnnnnnnnnnnnnnnnnnnnnnnnnnnnnnnnnnnnnnnnnnnnnnnnnnnnnnnnnnnnnnnnnnnnnnnnnnnnnnnnnnnnnnnnnnnnnnnnnnnnnnnnnnnnnnnnnnnnnnnnnnnnnnnnnnnnnnnnnnnnnnnnnnnnnnnnnnnnnnnnnnnnnnnnnnnnnnnnnnnnnnnnnnnnnnnnnnnnnnnnnnnnnnnnnnnnnnnnnnnnnnnnnnnnnnnnnnnnnnnnnnnnnnnnnnnnnnnnnnnnnnnnnnnnnnnnnnnnnnnnnnnnnnnnnnnnnnnnnnnnnnnnnnnnnnnnnnnnnnnnnnnnnnnnnnnnnnnnnnnnnnnnnnnnnnnnnnnnnnnnnnnnnnnnnnnnnnnnnnnnnnnnnnnnnnnnnnnnnnnnnnnnnnnnnnnnnnnnnnnnnnnnnnnnnnnnnnnnnnnnnnnnnnnnnnnnnnnnnnnnnnnnnnnnnnnnnnnnnnnnnnnnnnnnnnnnnnnnnnnnnnnnnnnnnnnnnnnnnnnnnnnnnnnnnnnnnnnnnnnnnnnnnnnnnnnnnnnnnnnnnnnnnnnnnnnnnnnnnnnnnnnnnnnnnnnnnnnnnnnnnnnnnnnnnnnnnnnnnnnnnnnnnnnnnnnnnnnnnnnnnnnnnnnnnnnnnnnnnnnnnnnnnnnnnnnnnnnnnnnnnnnnnnnnnnnnnnnnnnnnnnnnnnnnnnnnnnnnnnnnnnnnnnnnnnnnnnnnnnnnnnnnnnnnnnnnnnnnnnnnnnnnnnnnnnnnnnnnnnnnnnnnnnnnnnnnnnnnnnnnnnnnnnnnnnnnnnnnnnnnnnnnnnnnnnnnnnnnnnnnnnnnnnnnnnnnnnnnnnnnnnnnnnnnnnnnnnnnnnnnnnnnnnnnnnnnnnnnnnnnnnnnnnnnnnnnnnnnnnnnnnnnnnnnnnnnnnnnnnnnnnnnnnnnnnnnnnnnnnnnnnnnnnnnnnnnnnnnnnnnnnnnnnnnnnnnnnnnnnnnnnnnnnnnnnnnnnnnnnnnnnnnnnnnnnnnnnnnnnnnnnnnnnnnnnnnnnnnnnnnnnnnnnnnnnnnnnnnnnnnnnnnnnnnnnnnnnnnnnnnnnnnnnnnnnnnnnnnnnnnnnnnnnnnnnnnnnnnnnnnnnnnnnnnnnnnnnnnnnnnnnnnnnnnnnnnnnnnnnnnnnnnnnnnnnnnnnnnnnnnnnnnnnnnnnnnnnnnnnnnnnnnnnnnnnnnnnnnnnnnnnnnnnnnnnnnnnnnnnnnnnnnnnnnnnnnnnnnnnnnnnnnnnnnnnnnnnnnnnnnnnnnnnnnnnnnnnnnnnnnnnnnnnnnnnnnnnnnnnnnnnnnnnnnnnnnnnnnnnnnnnnnnnnnnnnnnnnnnnnnnnnnnnnnnnnnnnnnnnnnnnnnnnnnnnnnnnnnnnnnnnnnnnnnnnnnnnnnnnnnnnnnnnnnnnnnnnnnnnnnnnnnnnnnnnnnnnnnnnnnnnnnnnnnnnnnnnnnnnnnnnnnnnnnnnnnnnnnnnnnnnnnnnnnnnnnnnnnnnnnnnnnnnnnnnnnnnnnnnnnnnnnnnnnnnnnnnnnnnnnnnnnnnnnnnnnnnnnnnnnnnnnnnnnnnnnnnnnnnnnnnnnnnnnnnnnnnnnnnnnnnnnnnnnnnnnnnnnnnnnnnnnnnnnnnnnnnnnnnnnnnnnnnnnnnnnnnnnnnnnnnnnnnnnnnnnnnnnnnnnnnnnnnnnnnnnnnnnnnnnnnnnnnnnnnnnnnnnnnnnnnnnnnnnnnnnnnnnnnnnnnnnnnnnnnnnnnnnnnnnnnnnnnnnnnnnnnnnnnnnnnnnnnnnnnnnnnnnnnnnnnnnnnnnnnnnnnnnnnnnnnnnnnnnnnnnnnnnnnnnnnnnnnnnnnnnnnnnnnnnnnnnnnnnnnnnnnnnnnnnnnnnnnnnnnnnnnnnnnnnnnnnnnnnnnnnnnnnnnnnnnnnnnnnnnnnnnnnnnnnnnnnnnnnnnnnnnnnnnnnnnnnnnnnnnnnnnnnnnnnnnnnnnnnnnnnnnnnnnnnnnnnnnnnnnnnnnnnnnnnnnnnnnnnnnnnnnnnnnnnnnnnnnnnnnnnnnnnnnnnnnnnnnnnnnnnnnnnnnnnnnnnnnnnnnnnnnnnnnnnnnnnnnnnnnnnnnnnnnnnnnnnnnnnnnnnnnnnnnnnnnnnnnnnnnnnnnnnnnnnnnnnnnnnnnnnnnnnnnnnnnnnnnnnnnnnnnnnnnnnnnnnnnnnnnnnnnnnnnnnnnnnnnnnnnnnnnnnnnnnnnnnnnnnnnnnnnnnnnnnnnnnnnnnnnnnnnnnnnnnnnnnnnnnnnnnnnnnnnnnnnnnnnnnnnnnnnnnnnnnnnnnnnnnnnnnnnnnnnnnnnnnnnnnnnnnnnnnnnnnnnnnnnnnnnnnnnnnnnnnnnnnnnnnnnnnnnnnnnnnnnnnnnnnnnnnnnnnnnnnnnnnnnnnnnnnnnnnnnnnnnnnnnnnnnnnnnnnnnnnnnnnnnnnnnnnnnnnnnnnnnnnnnnnnnnnnnnnnnnnnnnnnnnnnnnnnnnnnnnnnnnnnnnnnnnnnnnnnnnnnnnnnnnnnnnnnnnnnnnnnnnnnnnnnnnnnnnnnnnnnnnnnnnnnnnnnnnnnnnnnnnnnnnnnnnnnnnnnnnnnnnnnnnnnnnnnnnnnnnnnnnnnnnnnnnnnnnnnnnnnnnnnnnnnnnnnnnnnnnnnnnnnnnnnnnnnnnnnnnnnnnnnnnnnnnnnnnnnnnnnnnnnnnnnnnnnnnnnnnnnnnnnnnnnnnnnnnnnnnnnnnnnnnnnnnnnnnnnnnnnnnnnnnnnnnnnnnnnnnnnnnnnnnnnnnnnnnnnnnnnnnnnnnnnnnnnnnnnnnnnnnnnnnnnnnnnnnnnnnnnnnnnnnnnnnnnnnnnnnnnnnnnnnnnnnnnnnnnnnnnnnnnnnnnnnnnnnnnnnnnnnnnnnnnnnnnnnnnnnnnnnnnnnnnnnnnnnnnnnnnnnnnnnnnnnnnnnnnnnnnnnnnnnnnnnnnnnnnnnnnnnnnnnnnnnnnnnnnnnnnnnnnnnnnnnnnnnnnnnnnnnnnnnnnnnnnnnnnnnnnnnnnnnnnnnnnnnnnnnnnnnnnnnnnnnnnnnnnnnnnnnnnnnnnnnnnnnnnnnnnnnnnnnnnnnnnnnnnnnnnnnnnnnnnnnnnnnnnnnnnnnnnnnnnnnnnnnnnnnnnnnnnnnnnnnnnnnnnnnnnnnnnnnnnnnnnnnnnnnnnnnnnnnnnnnnnnnnnnnnnnnnnnnnnnnnnnnnnnnnnnnnnnnnnnnnnnnnnnnnnnnnnnnnnnnnnnnnnnnnnnnnnnnnnnnnnnnnnnnnnnnnnnnnnnnnnnnnnnnnnnnnnnnnnnnnnnnnnnnnnnnnnnnnnnnnnnnnnnnnnnnnnnnnnnnnnnnnnnnnnnnnnnnnnnnnnnnnnnnnnnnnnnnnnnnnnnnnnnnnnnnnnnnnnnnnnnnnnnnnnnnnnnnnnnnnnnnnnnnnnnnnnnnnnnnnnnnnnnnnnnnnnnnnnnnnnnnnnnnnnnnnnnnnnnnnnnnnnnnnnnnnnnnnnnnnnnnnnnnnnnnnnnnnnnnnnnnnnnnnnnnnnnnnnnnnnnnnnnnnnnnnnnnnnnnnnnnnnnnnnnnnnnnnnnnnnnnnnnnnnnnnnnnnnnnnnnnnnnnnnnnnnnnnnnnnnnnnnnnnnnnnnnnnnnnnnnnnnnnnnnnnnnnnnnnnnnnnnnnnnnnnnnnnnnnnnnnnnnnnnnnnnnnnnnnnnnnnnnnnnnnnnnnnnnnnnnnnnnnnnnnnnnnnnnnnnnnnnnnnnnnnnnnnnnnnnnnnnnnnnnnnnnnnnnnnnnnnnnnnnnnnnnnnnnnnnnnnnnnnnnnnnnnnnnnnnnnnnnnnnnnnnnnnnnnnnnnnnnnnnnnnnnnnnnnnnnnnnnnnnnnnnnnnnnnnnnnnnnnnnnnnnnnnnnnnnnnnnnnnnnnnnnnnnnnnnnnnnnnnnnnnnnnnnnnnnnnnnnnnnnnnnnnnnnnnnnnnnnnnnnnnnnnnnnnnnnnnnnnnnnnnnnnnnnnnnnnnnnnnnnnnnnnnnnnnnnnnnnnnnnnnnnnnnnnnnnnnnnnnnnnnnnnnnnnnnnnnnnnnnnnnnnnnnnnnnnnnnnnnnnnnnnnnnnnnnnnnnnnnnnnnnnnnnnnnnnnnnnnnnnnnnnnnnnnnnnnnnnnnnnnnnnnnnnnnnnnnnnnnnnnnnnnnnnnnnnnnnnnnnnnnnnnnnnnnnnnnnnnnnnnnnnnnnnnnnnnnnnnnnnnnnnnnnnnnnnnnnnnnnnnnnnnnnnnnnnnnnnnnnnnnnnnnnnnnnnnnnnnnnnnnnnnnnnnnnnnnnnnnnnnnnnnnnnnnnnnnnnnnnnnnnnnnnnnnnnnnnnnnnnnnnnnnnnnnnnnnnnnnnnnnnnnnnnnnnnnnnnnnnnnnnnnnnnnnnnnnnnnnnnnnnnnnnnnnnnnnnnnnnnnnnnnnnnnnnnnnnnnnnnnnnnnnnnnnnnnnnnnnnnnnnnnnnnnnnnnnnnnnnnnnnnnnnnnnnnnnnnnnnnnnnnnnnnnnnnnnnnnnnnnnnnnnnnnnnnnnnnnnnnnnnnnnnnnnnnnnnnnnnnnnnnnnnnnnnnnnnnnnnnnnnnnnnnnnnnnnnnnnnnnnnnnnnnnnnnnnnnnnnnnnnnnnnnnnnnnnnnnnnnnnnnnnnnnnnnnnnnnnnnnnnnnnnnnnnnnnnnnnnnnnnnnnnnnnnnnnnnnnnnnnnnnnnnnnnnnnnnnnnnnnnnnnnnnnnnnnnnnnnnnnnnnnnnnnnnnnnnnnnnnnnnnnnnnnnnnnnnnnnnnnnnnnnnnnnnnnnnnnnnnnnnnnnnnnnnnnnnnnnnnnnnnnnnnnnnnnnnnnnnnnnnnnnnnnnnnnnnnnnnnnnnnnnnnnnnnnnnnnnnnnnnnnnnnnnnnnnnnnnnnnnnnnnnnnnnnnnnnnnnnnnnnnnnnnnnnnnnnnnnnnnnnnnnnnnnnnnnnnnnnnnnnnnnnnnnnnnnnnnnnnnnnnnnnnnnnnnnnnnnnnnnnnnnnnnnnnnnnnnnnnnnnnnnnnnnnnnnnnnnnnnnnnnnnnnnnnnnnnnnnnnnnnnnnnnnnnnnnnnnnnnnnnnnnnnnnnnnnnnnnnnnnnnnnnnnnnnnnnnnnnnnnnnnnnnnnnnnnnnnnnnnnnnnnnnnnnnnnnnnnnnnnnnnnnnnnnnnnnnnnnnnnnnnnnnnnnnnnnnnnnnnnnnnnnnnnnnnnnnnnnnnnnnnnnnnnnnnnnnnnnnnnnnnnnnnnnnnnnnnnnnnnnnnnnnnnnnnnnnnnnnnnnnnnnnnnnnnnnnnnnnnnnnnnnnnnnnnnnnnnnnnnnnnnnnnnnnnnnnnnnnnnnnnnnnnnnnnnnnnnnnnnnnnnnnnnnnnnnnnnnnnnnnnnnnnnnnnnnnnnnnnnnnnnnnnnnnnnnnnnnnnnnnnnnnnnnnnnnnnnnnnnnnnnnnnnnnnnnnnnnnnnnnnnnnnnnnnnnnnnnnnnnnnnnnnnnnnnnnnnnnnnnnnnnnnnnnnnnnnnnnnnnnnnnnnnnnnnnnnnnnnnnnnnnnnnnnnnnnnnnnnnnnnnnnnnnnnnnnnnnnnnnnnnnnnnnnnnnnnnnnnnnnnnnnnnnnnnnnnnnnnnnnnnnnnnnnnnnnnnnnnnnnnnnnnnnnnnnnnnnnnnnnnnnnnnnnnnnnnnnnnnnnnnnnnnnnnnnnnnnnnnnnnnnnnnnnnnnnnnnnnnnnnnnnnnnnnnnnnnnnnnnnnnnnnnnnnnnnnnnnnnnnnnnnnnnnnnnnnnnnnnnnnnnnnnnnnnnnnnnnnnnnnnnnnnnnnnnnnnnnnnnnnnnnnnnnnnnnnnnnnnnnnnnnnnnnnnnnnnnnnnnnnnnnnnnnnnnnnnnnnnnnnnnnnnnnnnnnnnnnnnnnnnnnnnnnnnnnnnnnnnnnnnnnnnnnnnnnnnnnnnnnnnnnnnnnnnnnnnnnnnnnnnnnnnnnnnnnnnnnnnnnnnnnnnnnnnnnnnnnnnnnnnnnnnnnnnnnnnnnnnnnnnnnnnnnnnnnnnnnnnnnnnnnnnnnnnnnnnnnnnnnnnnnnnnnnnnnnnnnnnnnnnnnnnnnnnnnnnnnnnnnnnnnnnnnnnnnnnnnnnnnnnnnnnnnnnnnnnnnnnnnnnnnnnnnnnnnnnnnnnnnnnnnnnnnnnnnnnnnnnnnnnnnnnnnnnnnnnnnnnnnnnnnnnnnnnnnnnnnnnnnnnnnnnnnnnnnnnnnnnnnnnnnnnnnnnnnnnnnnnnnnnnnnnnnnnnnnnnnnnnnnnnnnnnnnnnnnnnnnnnnnnnnnnnnnnnnnnnnnnnnnnnnnnnnnnnnnnnnnnnnnnnnnnnnnnnnnnnnnnnnnnnnnnnnnnnnnnnnnnnnnnnnnnnnnnnnnnnnnnnnnnnnnnnnnnnnnnnnnnnnnnnnnnnnnnnnnnnnnnnnnnnnnnnnnnnnnnnnnnnnnnnnnnnnnnnnnnnnnnnnnnnnnnnnnnnnnnnnnnnnnnnnnnnnnnnnnnnnnnnnnnnnnnnnnnnnnnnnnnnnnnnnnnnnnnnnnnnnnnnnnnnnnnnnnnnnnnnnnnnnnnnnnnnnnnnnnnnnnnnnnnnnnnnnnnnnnnnnnnnnnnnnnnnnnnnnnnnnnnnnnnnnnnnnnnnnnnnnnnnnnnnnnnnnnnnnnnnnnnnnnnnnnnnnnnnnnnnnnnnnnnnnnnnnnnnnnnnnnnnnnnnnnnnnnnnnnnnnnnnnnnnnnnnnnnnnnnnnnnnnnnnnnnnnnnnnnnnnnnnnnnnnnnnnnnnnnnnnnnnnnnnnnnnnnnnnnnnnnnnnnnnnnnnnnnnnnnnnnnnnnnnnnnnnnnnnnnnnnnnnnnnnnnnnnnnnnnnnnnnnnnnnnnnnnnnnnnnnnnnnnnnnnnnnnnnnnnnnnnnnnnnnnnnnnnnnnnnnnnnnnnnnnnnnnnnnnnnnnnnnnnnnnnnnnnnnnnnnnnnnnnnnnnnnnnnnnnnnnnnnnnnnnnnnnnnnnnnnnnnnnnnnnnnnnnnnnnnnnnnnnnnnnnnnnnnnnnnnnnnnnnnnnnnnnnnnnnnnnnnnnnnnnnnnnnnnnnnnnnnnnnnnnnnnnnnnnnnnnnnnnnnnnnnnnnnnnnnnnnnnnnnnnnnnnnnnnnnnnnnnnnnnnnnnnnnnnnnnnnnnnnnnnnnnnnnnnnnnnnnnnnnnnnnnnnnnnnnnnnnnnnnnnnnnnnnnnnnnnnnnnnnnnnnnnnnnnnnnnnnnnnnnnnnnnnnnnnnnnnnnnnnnnnnnnnnnnnnnnnnnnnnnnnnnnnnnnnnnnnnnnnnnnnnnnnnnnnnnnnnnnnnnnnnnnnnnnnnnnnnnnnnnnnnnnnnnnnnnnnnnnnnnnnnnnnnnnnnnnnnnnnnnnnnnnnnnnnnnnnnnnnnnnnnnnnnnnnnnnnnnnnnnnnnnnnnnnnnnnnnnnnnnnnnnnnnnnnnnnnnnnnnnnnnnnnnnnnnnnnnnnnnnnnnnnnnnnnnnnnnnnnnnnnnnnnnnnnnnnnnnnnnnnnnnnnnnnnnnnnnnnnnnnnnnnnnnnnnnnnnnnnnnnnnnnnnnnnnnnnnnnnnnnnnnnnnnnnnnnnnnnnnnnnnnnnnnnnnnnnnnnnnnnnnnnnnnnnnnnnnnnnnnnnnnnnnnnnnnnnnnnnnnnnnnnnnnnnnnnnnnnnnnnnnnnnnnnnnnnnnnnnnnnnnnnnnnnnnnnnnnnnnnnnnnnnnnnnnnnnnnnnnnnnnnnnnnnnnnnnnnnnnnnnnnnnnnnnnnnnnnnnnnnnnnnnnnnnnnnnnnnnnnnnnnnnnnnnnnnnnnnnnnnnnnnnnnnnnnnnnnnnnnnnnnnnnnnnnnnnnnnnnnnnnnnnnnnnnnnnnnnnnnnnnnnnnnnnnnnnnnnnnnnnnnnnnnnnnnnnnnnnnnnnnnnnnnnnnnnnnnnnnnnnnnnnnnnnnnnnnnnnnnnnnnnnnnnnnnnnnnnnnnnnnnnnnnnnnnnnnnnnnnnnnnnnnnnnnnnnnnnnnnnnnnnnnnnnnnnnnnnnnnnnnnnnnnnnnnnnnnnnnnnnnnnnnnnnnnnnnnnnnnnnnnnnnnnnnnnnnnnnnnnnnnnnnnnnnnnnnnnnnnnnnnnnnnnnnnnnnnnnnnnnnnnnnnnnnnnnnnnnnnnnnnnnnnnnnnnnnnnnnnnnnnnnnnnnnnnnnnnnnnnnnnnnnnnnnnnnnnnnnnnnnnnnnnnnnnnnnnnnnnnnnnnnnnnnnnnnnnnnnnnnnnnnnnnnnnnnnnnnnnnnnnnnnnnnnnnnnnnnnnnnnnnnnnnnnnnnnnnnnnnnnnnnnnnnnnnnnnnnnnnnnnnnnnnnnnnnnnnnnnnnnnnnnnnnnnnnnnnnnnnnnnnnnnnnnnnnnnnnnnnnnnnnnnnnnnnnnnnnnnnnnnnnnnnnnnnnnnnnnnnnnnnnnnnnnnnnnnnnnnnnnnnnnnnnnnnnnnnnnnnnnnnnnnnnnnnnnnnnnnnnnnnnnnnnnnnnnnnnnnnnnnnnnnnnnnnnnnnnnnnnnnnnnnnnnnnnnnnnnnnnnnnnnnnnnnnnnnnnnnnnnnnnnnnnnnnnnnnnnnnnnnnnnnnnnnnnnnnnnnnnnnnnnnnnnnnnnnnnnnnnnnnnnnnnnnnnnnnnnnnnnnnnnnnnnnnnnnnnnnnnnnnnnnnnnnnnnnnnnnnnnnnnnnnnnnnnnnnnnnnnnnnnnnnnnnnnnnnnnnnnnnnnnnnnnnnnnnnnnnnnnnnnnnnnnnnnnnnnnnnnnnnnnnnnnnnnnnnnnnnnnnnnnnnnnnnnnnnnnnnnnnnnnnnnnnnnnnnnnnnnnnnnnnnnnnnnnnnnnnnnnnnnnnnnnnnnnnnnnnnnnnnnnnnnnnnnnnnnnnnnnnnnnnnnnnnnnnnnnnnnnnnnnnnnnnnnnnnnnnnnnnnnnnnnnnnnnnnnnnnnnnnnnnnnnnnnnnnnnnnnnnnnnnnnnnnnnnnnnnnnnnnnnnnnnnnnnnnnnnnnnnnnnnnnnnnnnnnnnnnnnnnnnnnnnnnnnnnnnnnnnnnnnnnnnnnnnnnnnnnnnnnnnnnnnnnnnnnnnnnnnnnnnnnnnnnnnnnnnnnnnnnnnnnnnnnnnnnnnnnnnnnnnnnnnnnnnnnnnnnnnnnnnnnnnnnnnnnnnnnnnnnnnnnnnnnnnnnnnnnnnnnnnnnnnnnnnnnnnnnnnnnnnnnnnnnnnnnnnnnnnnnnnnnnnnnnnnnnnnnnnnnnnnnnnnnnnnnnnnnnnnnnnnnnnnnnnnnnnnnnnnnnnnnnnnnnnnnnnnnnnnnnnnnnnnnnnnnnnnnnnnnnnnnnnnnnnnnnnnnnnnnnnnnnnnnnnnnnnnnnnnnnnnnnnnnnnnnnnnnnnnnnnnnnnnnnnnnnnnnnnnnnnnnnnnnnnnnnnnnnnnnnnnnnnnnnnnnnnnnnnnnnnnnnnnnnnnnnnnnnnnnnnnnnnnnnnnnnnnnnnnnnnnnnnnnnnnnnnnnnnnnnnnnnnnnnnnnnnnnnnnnnnnnnnnnnnnnnnnnnnnnnnnnnnnnnnnnnnnnnnnnnnnnnnnnnnnnnnnnnnnnnnnnnnnnnnnnnnnnnnnnnnnnnnnnnnnnnnnnnnnnnnnnnnnnnnnnnnnnnnnnnnnnnnnnnnnnnnnnnnnnnnnnnnnnnnnnnnnnnnnnnnnnnnnnnnnnnnnnnnnnnnnnnnnnnnnnnnnnnnnnnnnnnnnnnnnnnnnnnnnnnnnnnnnnnnnnnnnnnnnnnnnnnnnnnnnnnnnnnnnnnnnnnnnnnnnnnnnnnnnnnnnnnnnnnnnnnnnnnnnnnnnnnnnnnnnnnnnnnnnnnnnnnnnnnnnnnnnnnnnnnnnnnnnnnnnnnnnnnnnnnnnnnnnnnnnnnnnnnnnnnnnnnnnnnnnnnnnnnnnnnnnnnnnnnnnnnnnnnnnnnnnnnnnnnnnnnnnnnnnnnnnnnnnnnnnnnnnnnnnnnnnnnnnnnnnnnnnnnnnnnnnnnnnnnnnnnnnnnnnnnnnnnnnnnnnnnnnnnnnnnnnnnnnnnnnnnnnnnnnnnnnnnnnnnnnnnnnnnnnnnnnnnnnnnnnnnnnnnnnnnnnnnnnnnnnnnnnnnnnnnnnnnnnnnnnnnnnnnnnnnnnnnnnnnnnnnnnnnnnnnnnnnnnnnnnnnnnnnnnnnnnnnnnnnnnnnnnnnnnnnnnnnnnnnnnnnnnnnnnnnnnnnnnnnnnnnnnnnnnnnnnnnnnnnnnnnnnnnnnnnnnnnnnnnnnnnnnnnnnnnnnnnnnnnnnnnnnnnnnnnnnnnnnnnnnnnnnnnnnnnnnnnnnnnnnnnnnnnnnnnnnnnnnnnnnnnnnnnnnnnnnnnnnnnnnnnnnnnnnnnnnnnnnnnnnnnnnnnnnnnnnnnnnnnnnnnnnnnnnnnnnnnnnnnnnnnnnnnnnnnnnnnnnnnnnnnnnnnnnnnnnnnnnnnnnnnnnnnnnnnnnnnnnnnnnnnnnnnnnnnnnnnnnnnnnnnnnnnnnnnnnnnnnnnnnnnnnnnnnnnnnnnnnnnnnnnnnnnnnnnnnnnnnnnnnnnnnnnnnnnnnnnnnnnnnnnnnnnnnnnnnnnnnnnnnnnnnnnnnnnnnnnnnnnnnnnnnnnnnnnnnnnnnnnnnnnnnnnnnnnnnnnnnnnnnnnnnnnnnnnnnnnnnnnnnnnnnnnnnnnnnnnnnnnnnnnnnnnnnnnnnnnnnnnnnnnnnnnnnnnnnnnnnnnnnnnnnnnnnnnnnnnnnnnnnnnnnnnnnnnnnnnnnnnnnnnnnnnnnnnnnnnnnnnnnnnnnnnnnnnnnnnnnnnnnnnnnnnnnnnnnnnnnnnnnnnnnnnnnnnnnnnnnnnnnnnnnnnnnnnnnnnnnnnnnnnnnnnnnnnnnnnnnnnnnnnnnnnnnnnnnnnnnnnnnnnnnnnnnnnnnnnnnnnnnnnnnnnnnnnnnnnnnnnnnnnnnnnnnnnnnnnnnnnnnnnnnnnnnnnnnnnnnnnnnnnnnnnnnnnnnnnnnnnnnnnnnnnnnnnnnnnnnnnnnnnnnnnnnnnnnnnnnnnnnnnnnnnnnnnnnnnnnnnnnnnnnnnnnnnnnnnnnnnnnnnnnnnnnnnnnnnnnnnnnnnnnnnnnnnnnnnnnnnnnnnnnnnnnnnnnnnnnnnnnnnnnnnnnnnnnnnnnnnnnnnnnnnnnnnnnnnnnnnnnnnnnnnnnnnnnnnnnnnnnnnnnnnnnnnnnnnnnnnnnnnnnnnnnnnnnnnnnnnnnnnnnnnnnnnnnnnnnnnnnnnnnnnnnnnnnnnnnnnnnnnnnnnnnnnnnnnnnnnnnnnnnnnnnnnnnnnnnnnnnnnnnnnnnnnnnnnnnnnnnnnnnnnnnnnnnnnnnnnnnnnnnnnnnnnnnnnnnnnnnnnnnnnnnnnnnnnnnnnnnnnnnnnnnnnnnnnnnnnnnnnnnnnnnnnnnnnnnnnnnnnnnnnnnnnnnnnnnnnnnnnnnnnnnnnnnnnnnnnnnnnnnnnnnnnnnnnnnnnnnnnnnnnnnnnnnnnnnnnnnnnnnnnnnnnnnnnnnnnnnnnnnnnnnnnnnnnnnnnnnnnnnnnnnnnnnnnnnnnnnnnnnnnnnnnnnnnnnnnnnnnnnnnnnnnnnnnnnnnnnnnnnnnnnnnnnnnnnnnnnnnnnnnnnnnnnnnnnnnnnnnnnnnnnnnnnnnnnnnnnnnnnnnnnnnnnnnnnnnnnnnnnnnnnnnnnnnnnnnnnnnnnnnnnnnnnnnnnnnnnnnnnnnnnnnnnnnnnnnnnnnnnnnnnnnnnnnnnnnnnnnnnnnnnnnnnnnnnnnnnnnnnnnnnnnnnnnnnnnnnnnnnnnnnnnnnnnnnnnnnnnnnnnnnnnnnnnnnnnnnnnnnnnnnnnnnnnnnnnnnnnnnnnnnnnnnnnnnnnnnnnnnnnnnnnnnnnnnnnnnnnnnnnnnnnnnnnnnnnnnnnnnnnnnnnnnnnnnnnnnnnnnnnnnnnnnnnnnnnnnnnnnnnnnnnnnnnnnnnnnnnnnnnnnnnnnnnnnnnnnnnnnnnnnnnnnnnnnnnnnnnnnnnnnnnnnnnnnnnnnnnnnnnnnnnnnnnnnnnnnnnnnnnnnnnnnnnnnnnnnnnnnnnnnnnnnnnnnnnnnnnnnnnnnnnnnnnnnnnnnnnnnnnnnnnnnnnnnnnnnnnnnnnnnnnnnnnnnnnnnnnnnnnnnnnnnnnnnnnnnnnnnnnnnnnnnnnnnnnnnnnnnnnnnnnnnnnnnnnnnnnnnnnnnnnnnnnnnnnnnnnnnnnnnnnnnnnnnnnnnnnnnnnnnnnnnnnnnnnnnnnnnnnnnnnnnnnnnnnnnnnnnnnnnnnnnnnnnnnnnnnnnnnnnnnnnnnnnnnnnnnnnnnnnnnnnnnnnnnnnnnnnnnnnnnnnnnnnnnnnnnnnnnnnnnnnnnnnnnnnnnnnnnnnnnnnnnnnnnnnnnnnnnnnnnnnnnnnnnnnnnnnnnnnnnnnnnnnnnnnnnnnnnnnnnnnnnnnnnnnnnnnnnnnnnnnnnnnnnnnnnnnnnnnnnnnnnnnnnnnnnnnnnnnnnnnnnnnnnnnnnnnnnnnnnnnnnnnnnnnnnnnnnnnnnnnnnnnnnnnnnnnnnnnnnnnnnnnnnnnnnnnnnnnnnnnnnnnnnnnnnnnnnnnnnnnnnnnnnnnnnnnnnnnnnnnnnnnnnnnnnnnnnnnnnnnnnnnnnnnnnnnnnnnnnnnnnnnnnnnnnnnnnnnnnnnnnnnnnnnnnnnnnnnnnnnnnnnnnnnnnnnnnnnnnnnnnnnnnnnnnnnnnnnnnnnnnnnnnnnnnnnnnnnnnnnnnnnnnnnnnnnnnnnnnnnnnnnnnnnnnnnnnnnnnnnnnnnnnnnnnnnnnnnnnnnnnnnnnnnnnnnnnnnnnnnnnnnnnnnnnnnnnnnnnnnnnnnnnnnnnnnnnnnnnnnnnnnnnnnnnnnnnnnnnnnnnnnnnnnnnnnnnnnnnnnnnnnnnnnnnnnnnnnnnnnnnnnnnnnnnnnnnnnnnnnnnnnnnnnnnnnnnnnnnnnnnnnnnnnnnnnnnnnnnnnnnnnnnnnnnnnnnnnnnnnnnnnnnnnnnnnnnnnnnnnnnnnnnnnnnnnnnnnnnnnnnnnnnnnnnnnnnnnnnnnnnnnnnnnnnnnnnnnnnnnnnnnnnnnnnnnnnnnnnnnnnnnnnnnnnnnnnnnnnnnnnnnnnnnnnnnnnnnnnnnnnnnnnnnnnnnnnnnnnnnnnnnnnnnnnnnnnnnnnnnnnnnnnnnnnnnnnnnnnnnnnnnnnnnnnnnnnnnnnnnnnnnnnnnnnnnnnnnnnnnnnnnnnnnnnnnnnnnnnnnnnnnnnnnnnnnnnnnnnnnnnnnnnnnnnnnnnnnnnnnnnnnnnnnnnnnnnnnnnnnnnnnnnnnnnnnnnnnnnnnnnnnnnnnnnnnnnnnnnnnnnnnnnnnnnnnnnnnnnnnnnnnnnnnnnnnnnnnnnnnnnnnnnnnnnnnnnnnnnnnnnnnnnnnnnnnnnnnnnnnnnnnnnnnnnnnnnnnnnnnnnnnnnnnnnnnnnnnnnnnnnnnnnnnnnnnnnnnnnnnnnnnnnnnnnnnnnnnnnnnnnnnnnnnnnnnnnnnnnnnnnnnnnnnnnnnnnnnnnnnnnnnnnnnnnnnnnnnnnnnnnnnnnnnnnnnnnnnnnnnnnnnnnnnnnnnnnnnnnnnnnnnnnnnnnnnnnnnnnnnnnnnnnnnnnnnnnnnnnnnnnnnnnnnnnnnnnnnnnnnnnnnnnnnnnnnnnnnnnnnnnnnnnnnnnnnnnnnnnnnnnnnnnnnnnnnnnnnnnnnnnnnnnnnnnnnnnnnnnnnnnnnnnnnnnnnnnnnnnnnnnnnnnnnnnnnnnnnnnnnnnnnnnnnnnnnnnnnnnnnnnnnnnnnnnnnnnnnnnnnnnnnnnnnnnnnnnnnnnnnnnnnnnnnnnnnnnnnnnnnnnnnnnnnnnnnnnnnnnnnnnnnnnnnnnnnnnnnnnnnnnnnnnnnnnnnnnnnnnnnnnnnnnnnnnnnnnnnnnnnnnnnnnnnnnnnnnnnnnnnnnnnnnnnnnnnnnnnnnnnnnnnnnnnnnnnnnnnnnnnnnnnnnnnnnnnnnnnnnnnnnnnnnnnnnnnnnnnnnnnnnnnnnnnnnnnnnnnnnnnnnnnnnnnnnnnnnnnnnnnnnnnnnnnnnnnnnnnnnnnnnnnnnnnnnnnnnnnnnnnnnnnnnnnnnnnnnnnnnnnnnnnnnnnnnnnnnnnnnnnnnnnnnnnnnnnnnnnnnnnnnnnnnnnnnnnnnnnnnnnnnnnnnnnnnnnnnnnnnnnnnnnnnnnnnnnnnnnnnnnnnnnnnnnnnnnnnnnnnnnnnnnnnnnnnnnnnnnnnnnnnnnnnnnnnnnnnnnnnnnnnnnnnnnnnnnnnnnnnnnnnnnnnnnnnnnnnnnnnnnnnnnnnnnnnnnnnnnnnnnnnnnnnnnnnnnnnnnnnnnnnnnnnnnnnnnnnnnnnnnnnnnnnnnnnnnnnnnnnnnnnnnnnnnnnnnnnnnnnnnnnnnnnnnnnnnnnnnnnnnnnnnnnnnnnnnnnnnnnnnnnnnnnnnnnnnnnnnnnnnnnnnnnnnnnnnnnnnnnnnnnnnnnnnnnnnnnnnnnnnnnnnnnnnnnnnnnnnnnnnnnnnnnnnnnnnnnnnnnnnnnnnnnnnnnnnnnnnnnnnnnnnnnnnnnnnnnnnnnnnnnnnnnnnnnnnnnnnnnnnnnnnnnnnnnnnnnnnnnnnnnnnnnnnnnnnnnnnnnnnnnnnnnnnnnnnnnnnnnnnnnnnnnnnnnnnnnnnnnnnnnnnnnnnnnnnnnnnnnnnnnnnnnnnnnnnnnnnnnnnnnnnnnnnnnnnnnnnnnnnnnnnnnnnnnnnnnnnnnnnnnnnnnnnnnnnnnnnnnnnnnnnnnnnnnnnnnnnnnnnnnnnnnnnnnnnnnnnnnnnnnnnnnnnnnnnnnnnnnnnnnnnnnnnnnnnnnnnnnnnnnnnnnnnnnnnnnnnnnnnnnnnnnnnnnnnnnnnnnnnnnnnnnnnnnnnnnnnnnnnnnnnnnnnnnnnnnnnnnnnnnnnnnnnnnnnnnnnnnnnnnnnnnnnnnnnnnnnnnnnnnnnnnnnnnnnnnnnnnnnnnnnnnnnnnnnnnnnnnnnnnnnnnnnnnnnnnnnnnnnnnnnnnnnnnnnnnnnnnnnnnnnnnnnnnnnnnnnnnnnnnnnnnnnnnnnnnnnnnnnnnnnnnnnnnnnnnnnnnnnnnnnnnnnnnnnnnnnnnnnnnnnnnnnnnnnnnnnnnnnnnnnnnnnnnnnnnnnnnnnnnnnnnnnnnnnnnnnnnnnnnnnnnnnnnnnnnnnnnnnnnnnnnnnnnnnnnnnnnnnnnnnnnnnnnnnnnnnnnnnnnnnnnnnnnnnnnnnnnnnnnnnnnnnnnnnnnnnnnnnnnnnnnnnnnnnnnnnnnnnnnnnnnnnnnnnnnnnnnnnnnnnnnnnnnnnnnnnnnnnnnnnnnnnnnnnnnnnnnnnnnnnnnnnnnnnnnnnnnnnnnnnnnnnnnnnnnnnnnnnnnnnnnnnnnnnnnnnnnnnnnnnnnnnnnnnnnnnnnnnnnnnnnnnnnnnnnnnnnnnnnnnnnnnnnnnnnnnnnnnnnnnnnnnnnnnnnnnnnnnnnnnnnnnnnnnnnnnnnnnnnnnnnnnnnnnnnnnnnnnnnnnnnnnnnnnnnnnnnnnnnnnnnnnnnnnnnnnnnnnnnnnnnnnnnnnnnnnnnnnnnnnnnnnnnnnnnnnnnnnnnnnnnnnnnnnnnnnnnnnnnnnnnnnnnnnnnnnnnnnnnnnnnnnnnnnnnnnnnnnnnnnnnnnnnnnnnnnnnnnnnnnnnnnnnnnnnnnnnnnnnnnnnnnnnnnnnnnnnnnnnnnnnnnnnnnnnnnnnnnnnnnnnnnnnnnnnnnnnnnnnnnnnnnnnnnnnnnnnnnnnnnnnnnnnnnnnnnnnnnnnnnnnnnnnnnnnnnnnnnnnnnnnnnnnnnnnnnnnnnnnnnnnnnnnnnnnnnnnnnnnnnnnnnnnnnnnnnnnnnnnnnnnnnnnnnnnnnnnnnnnnnnnnnnnnnnnnnnnnnnnnnnnnnnnnnnnnnnnnnnnnnnnnnnnnnnnnnnnnnnnnnnnnnnnnnnnnnnnnnnnnnnnnnnnnnnnnnnnnnnnnnnnnnnnnnnnnnnnnnnnnnnnnnnnnnnnnnnnnnnnnnnnnnnnnnnnnnnnnnnnnnnnnnnnnnnnnnnnnnnnnnnnnnnnnnnnnnnnnnnnnnnnnnnnnnnnnnnnnnnnnnnnnnnnnnnnnnnnnnnnnnnnnnnnnnnnnnnnnnnnnnnnnnnnnnnnnnnnnnnnnnnnnnnnnnnnnnnnnnnnnnnnnnnnnnnnnnnnnnnnnnnnnnnnnnnnnnnnnnnnnnnnnnnnnnnnnnnnnnnnnnnnnnnnnnnnnnnnnnnnnnnnnnnnnnnnnnnnnnnnnnnnnnnnnnnnnnnnnnnnnnnnnnnnnnnnnnnnnnnnnnnnnnnnnnnnnnnnnnnnnnnnnnnnnnnnnnnnnnnnnnnnnnnnnnnnnnnnnnnnnnnnnnnnnnnnnnnnnnnnnnnnnnnnnnnnnnnnnnnnnnnnnnnnnnnnnnnnnnnnnnnnnnnnnnnnnnnnnnnnnnnnnnnnnnnnnnnnnnnnnnnnnnnnnnnnnnnnnnnnnnnnnnnnnnnnnnnnnnnnnnnnnnnnnnnnnnnnnnnnnnnnnnnnnnnnnnnnnnnnnnnnnnnnnnnnnnnnnnnnnnnnnnnnnnnnnnnnnnnnnnnnnnnnnnnnnnnnnnnnnnnnnnnnnnnnnnnnnnnnnnnnnnnnnnnnnnnnnnnnnnnnnnnnnnnnnnnnnnnnnnnnnnnnnnnnnnnnnnnnnnnnnnnnnnnnnnnnnnnnnnnnnnnnnnnnnnnnnnnnnnnnnnnnnnnnnnnnnnnnnnnnnnnnnnnnnnnnnnnnnnnnnnnnnnnnnnnnnnnnnnnnnnnnnnnnnnnnnnnnnnnnnnnnnnnnnnnnnnnnnnnnnnnnnnnnnnnnnnnnnnnnnnnnnnnnnnnnnnnnnnnnnnnnnnnnnnnnnnnnnnnnnnnnnnnnnnnnnnnnnnnnnnnnnnnnnnnnnnnnnnnnnnnnnnnnnnnnnnnnnnnnnnnnnnnnnnnnnnnnnnnnnnnnnnnnnnnnnnnnnnnnnnnnnnnnnnnnnnnnnnnnnnnnnnnnnnnnnnnnnnnnnnnnnnnnnnnnnnnnnnnnnnnnnnnnnnnnnnnnnnnnnnnnnnnnnnnnnnnnnnnnnnnnnnnnnnnnnnnnnnnnnnnnnnnnnnnnnnnnnnnnnnnnnnnnnnnnnnnnnnnnnnnnnnnnnnnnnnnnnnnnnnnnnnnnnnnnnnnnnnnnnnnnnnnnnnnnnnnnnnnnnnnnnnnnnnnnnnnnnnnnnnnnnnnnnnnnnnnnnnnnnnnnnnnnnnnnnnnnnnnnnnnnnnnnnnnnnnnnnnnnnnnnnnnnnnnnnnnnnnnnnnnnnnnnnnnnnnnnnnnnnnnnnnnnnnnnnnnnnnnnnnnnnnnnnnnnnnnnnnnnnnnnnnnnnnnnnnnnnnnnnnnnnnnnnnnnnnnnnnnnnnnnnnnnnnnnnnnnnnnnnnnnnnnnnnnnnnnnnnnnnnnnnnnnnnnnnnnnnnnnnnnnnnnnnnnnnnnnnnnnnnnnnnnnnnnnnnnnnnnnnnnnnnnnnnnnnnnnnnnnnnnnnnnnnnnnnnnnnnnnnnnnnnnnnnnnnnnnnnnnnnnnnnnnnnnnnnnnnnnnnnnnnnnnnnnnnnnnnnnnnnnnnnnnnnnnnnnnnnnnnnnnnnnnnnnnnnnnnnnnnnnnnnnnnnnnnnnnnnnnnnnnnnnnnnnnnnnnnnnnnnnnnnnnnnnnnnnnnnnnnnnnnnnnnnnnnnnnnnnnnnnnnnnnnnnnnnnnnnnnnnnnnnnnnnnnnnnnnnnnnnnnnnnnnnnnnnnnnnnnnnnnnnnnnnnnnnnnnnnnnnnnnnnnnnnnnnnnnnnnnnnnnnnnnnnnnnnnnnnnnnnnnnnnnnnnnnnnnnnnnnnnnnnnnnnnnnnnnnnnnnnnnnnnnnnnnnnnnnnnnnnnnnnnnnnnnnnnnnnnnnnnnnnnnnnnnnnnnnnnnnnnnnnnnnnnnnnnnnnnnnnnnnnnnnnnnnnnnnnnnnnnnnnnnnnnnnnnnnnnnnnnnnnnnnnnnnnnnnnnnnnnnnnnnnnnnnnnnnnnnnnnnnnnnnnnnnnnnnnnnnnnnnnnnnnnnnnnnnnnnnnnnnnnnnnnnnnnnnnnnnnnnnnnnnnnnnnnnnnnnnnnnnnnnnnnnnnnnnnnnnnnnnnnnnnnnnnnnnnnnnnnnnnnnnnnnnnnnnnnnnnnnnnnnnnnnnnnnnnnnnnnnnnnnnnnnnnnnnnnnnnnnnnnnnnnnnnnnnnnnnnnnnnnnnnnnnnnnnnnnnnnnnnnnnnnnnnnnnnnnnnnnnnnnnnnnnnnnnnnnnnnnnnnnnnnnnnnnnnnnnnnnnnnnnnnnnnnnnnnnnnnnnnnnnnnnnnnnnnnnnnnnnnnnnnnnnnnnnnnnnnnnnnnnnnnnnnnnnnnnnnnnnnnnnnnnnnnnnnnnnnnnnnnnnnnnnnnnnnnnnnnnnnnnnnnnnnnnnnnnnnnnnnnnnnnnnnnnnnnnnnnnnnnnnnnnnnnnnnnnnnnnnnnnnnnnnnnnnnnnnnnnnnnnnnnnnnnnnnnnnnnnnnnnnnnnnnnnnnnnnnnnnnnnnnnnnnnnnnnnnnnnnnnnnnnnnnnnnnnnnnnnnnnnnnnnnnnnnnnnnnnnnnnnnnnnnnnnnnnnnnnnnnnnnnnnnnnnnnnnnnnnnnnnnnnnnnnnnnnnnnnnnnnnnnnnnnnnnnnnnnnnnnnnnnnnnnnnnnnnnnnnnnnnnnnnnnnnnnnnnnnnnnnnnnnnnnnnnnnnnnnnnnnnnnnnnnnnnnnnnnnnnnnnnnnnnnnnnnnnnnnnnnnnnnnnnnnnnnnnnnnnnnnnnnnnnnnnnnnnnnnnnnnnnnnnnnnnnnnnnnnnnnnnnnnnnnnnnnnnnnnnnnnnnnnnnnnnnnnnnnnnnnnnnnnnnnnnnnnnnnnnnnnnnnnnnnnnnnnnnnnnnnnnnnnnnnnnnnnnnnnnnnnnnnnnnnnnnnnnnnnnnnnnnnnnnnnnnnnnnnnnnnnnnnnnnnnnnnnnnnnnnnnnnnnnnnnnnnnnnnnnnnnnnnnnnnnnnnnnnnnnnnnnnnnnnnnnnnnnnnnnnnnnnnnnnnnnnnnnnnnnnnnnnnnnnnnnnnnnnnnnnnnnnnnnnnnnnnnnnnnnnnnnnnnnnnnnnnnnnnnnnnnnnnnnnnnnnnnnnnnnnnnnnnnnnnnnnnnnnnnnnnnnnnnnnnnnnnnnnnnnnnnnnnnnnnnnnnnnnnnnnnnnnnnnnnnnnnnnnnnnnnnnnnnnnnnnnnnnnnnnnnnnnnnnnnnnnnnnnnnnnnnnnnnnnnnnnnnnnnnnnnnnnnnnnnnnnnnnnnnnnnnnnnnnnnnnnnnnnnnnnnnnnnnnnnnnnnnnnnnnnnnnnnnnnnnnnnnnnnnnnnnnnnnnnnnnnnnnnnnnnnnnnnnnnnnnnnnnnnnnnnnnnnnnnnnnnnnnnnnnnnnnnnnnnnnnnnnnnnnnnnnnnnnnnnnnnnnnnnnnnnnnnnnnnnnnnnnnnnnnnnnnnnnnnnnnnnnnnnnnnnnnnnnnnnnnnnnnnnnnnnnnnnnnnnnnnnnnnnnnnnnnnnnnnnnnnnnnnnnnnnnnnnnnnnnnnnnnnnnnnnnnnnnnnnnnnnnnnnnnnnnnnnnnnnnnnnnnnnnnnnnnnnnnnnnnnnnnnnnnnnnnnnnnnnnnnnnnnnnnnnnnnnnnnnnnnnnnnnnnnnnnnnnnnnnnnnnnnnnnnnnnnnnnnnnnnnnnnnnnnnnnnnnnnnnnnnnnnnnnnnnnnnnnnnnnnnnnnnnnnnnnnnnnnnnnnnnnnnnnnnnnnnnnnnnnnnnnnnnnnnnnnnnnnnnnnnnnnnnnnnnnnnnnnnnnnnnnnnnnnnnnnnnnnnnnnnnnnnnnnnnnnnnnnnnnnnnnnnnnnnnnnnnnnnnnnnnnnnnnnnnnnnnnnnnnnnnnnnnnnnnnnnnnnnnnnnnnnnnnnnnnnnnnnnnnnnnnnnnnnnnnnnnnnnnnnnnnnnnnnnnnnnnnnnnnnnnnnnnnnnnnnnnnnnnnnnnnnnnnnnnnnnnnnnnnnnnnnnnnnnnnnnnnnnnnnnnnnnnnnnnnnnnnnnnnnnnnnnnnnnnnnnnnnnnnnnnnnnnnnnnnnnnnnnnnnnnnnnnnnnnnnnnnnnnnnnnnnnnnnnnnnnnnnnnnnnnnnnnnnnnnnnnnnnnnnnnnnnnnnnnnnnnnnnnnnnnnnnnnnnnnnnnnnnnnnnnnnnnnnnnnnnnnnnnnnnnnnnnnnnnnnnnnnnnnnnnnnnnnnnnnnnnnnnnnnnnnnnnnnnnnnnnnnnnnnnnnnnnnnnnnnnnnnnnnnnnnnnnnnnnnnnnnnnnnnnnnnnnnnnnnnnnnnnnnnnnnnnnnnnnnnnnnnnnnnnnnnnnnnnnnnnnnnnnnnnnnnnnnnnnnnnnnnnnnnnnnnnnnnnnnnnnnnnnnnnnnnnnnnnnnnnnnnnnnnnnnnnnnnnnnnnnnnnnnnnnnnnnnnnnnnnnnnnnnnnnnnnnnnnnnnnnnnnnnnnnnnnnnnnnnnnnnnnnnnnnnnnnnnnnnnnnnnnnnnnnnnnnnnnnnnnnnnnnnnnnnnnnnnnnnnnnnnnnnnnnnnnnnnnnnnnnnnnnnnnnnnnnnnnnnnnnnnnnnnnnnnnnnnnnnnnnnnnnnnnnnnnnnnnnnnnnnnnnnnnnnnnnnnnnnnnnnnnnnnnnnnnnnnnnnnnnnnnnnnnnnnnnnnnnnnnnnnnnnnnnnnnnnnnnnnnnnnnnnnnnnnnnnnnnnnnnnnnnnnnnnnnnnnnnnnnnnnnnnnnnnnnnnnnnnnnnnnnnnnnnnnnnnnnnnnnnnnnnnnnnnnnnnnnnnnnnnnnnnnnnnnnnnnnnnnnnnnnnnnnnnnnnnnnnnnnnnnnnnnnnnnnnnnnnnnnnnnnnnnnnnnnnnnnnnnnnnnnnnnnnnnnnnnnnnnnnnnnnnnnnnnnnnnnnnnnnnnnnnnnnnnnnnnnnnnnnnnnnnnnnnnnnnnnnnnnnnnnnnnnnnnnnnnnnnnnnnnnnnnnnnnnnnnnnnnnnnnnnnnnnnnnnnnnnnnnnnnnnnnnnnnnnnnnnnnnnnnnnnnnnnnnnnnnnnnnnnnnnnnnnnnnnnnnnnnnnnnnnnnnnnnnnnnnnnnnnnnnnnnnnnnnnnnnnnnnnnnnnnnnnnnnnnnnnnnnnnnnnnnnnnnnnnnnnnnnnnnnnnnnnnnnnnnnnnnnnnnnnnnnnnnnnnnnnnnnnnnnnnnnnnnnnnnnnnnnnnnnnnnnnnnnnnnnnnnnnnnnnnnnnnnnnnnnnnnnnnnnnnnnnnnnnnnnnnnnnnnnnnnnnnnnnnnnnnnnnnnnnnnnnnnnnnnnnnnnnnnnnnnnnnnnnnnnnnnnnnnnnnnnnnnnnnnnnnnnnnnnnnnnnnnnnnnnnnnnnnnnnnnnnnnnnnnnnnnnnnnnnnnnnnnnnnnnnnnnnnnnnnnnnnnnnnnnnnnnnnnnnnnnnnnnnnnnnnnnnnnnnnnnnnnnnnnnnnnnnnnnnnnnnnnnnnnnnnnnnnnnnnnnnnnnnnnnnnnnnnnnnnnnnnnnnnnnnnnnnnnnnnnnnnnnnnnnnnnnnnnnnnnnnnnnnnnnnnnnnnnnnnnnnnnnnnnnnnnnnnnnnnnnnnnnnnnnnnnnnnnnnnnnnnnnnnnnnnnnnnnnnnnnnnnnnnnnnnnnnnnnnnnnnnnnnnnnnnnnnnnnnnnnnnnnnnnnnnnnnnnnnnnnnnnnnnnnnnnnnnnnnnnnnnnnnnnnnnnnnnnnnnnnnnnnnnnnnnnnnnnnnnnnnnnnnnnnnnnnnnnnnnnnnnnnnnnnnnnnnnnnnnnnnnnnnnnnnnnnnnnnnnnnnnnnnnnnnnnnnnnnnnnnnnnnnnnnnnnnnnnnnnnnnnnnnnnnnnnnnnnnnnnnnnnnnnnnnnnnnnnnnnnnnnnnnnnnnnnnnnnnnnnnnnnnnnnnnnnnnnnnnnnnnnnnnnnnnnnnnnnnnnnnnnnnnnnnnnnnnnnnnnnnnnnnnnnnnnnnnnnnnnnnnnnnnnnnnnnnnnnnnnnnnnnnnnnnnnnnnnnnnnnnnnnnnnnnnnnnnnnnnnnnnnnnnnnnnnnnnnnnnnnnnnnnnnnnnnnnnnnnnnnnnnnnnnnnnnnnnnnnnnnnnnnnnnnnnnnnnnnnnnnnnnnnnnnnnnnnnnnnnnnnnnnnnnnnnnnnnnnnnnnnnnnnnnnnnnnnnnnnnnnnnnnnnnnnnnnnnnnnnnnnnnnnnnnnnnnnnnnnnnnnnnnnnnnnnnnnnnnnnnnnnnnnnnnnnnnnnnnnnnnnnnnnnnnnnnnnnnnnnnnnnnnnnnnnnnnnnnnnnnnnnnnnnnnnnnnnnnnnnnnnnnnnnnnnnnnnnnnnnnnnnnnnnnnnnnnnnnnnnnnnnnnnnnnnnnnnnnnnnnnnnnnnnnnnnnnnnnnnnnnnnnnnnnnnnnnnnnnnnnnnnnnnnnnnnnnnnnnnnnnnnnnnnnnnnnnnnnnnnnnnnnnnnnnnnnnnnnnnnnnnnnnnnnnnnnnnnnnnnnnnnnnnnnnnnnnnnnnnnnnnnnnnnnnnnnnnnnnnnnnnnnnnnnnnnnnnnnnnnnnnnnnnnnnnnnnnnnnnnnnnnnnnnnnnnnnnnnnnnnnnnnnnnnnnnnnnnnnnnnnnnnnnnnnnnnnnnnnnnnnnnnnnnnnnnnnnnnnnnnnnnnnnnnnnnnnnnnnnnnnnnnnnnnnnnnnnnnnnnnnnnnnnnnnnnnnnnnnnnnnnnnnnnnnnnnnnnnnnnnnnnnnnnnnnnnnnnnnnnnnnnnnnnnnnnnnnnnnnnnnnnnnnnnnnnnnnnnnnnnnnnnnnnnnnnnnnnnnnnnnnnnnnnnnnnnnnnnnnnnnnnnnnnnnnnnnnnnnnnnnnnnnnnnnnnnnnnnnnnnnnnnnnnnnnnnnnnnnnnnnnnnnnnnnnnnnnnnnnnnnnnnnnnnnnnnnnnnnnnnnnnnnnnnnnnnnnnnnnnnnnnnnnnnnnnnnnnnnnnnnnnnnnnnnnnnnnnnnnnnnnnnnnnnnnnnnnnnnnnnnnnnnnnnnnnnnnnnnnnnnnnnnnnnnnnnnnnnnnnnnnnnnnnnnnnnnnnnnnnnnnnnnnnnnnnnnnnnnnnnnnnnnnnnnnnnnnnnnnnnnnnnnnnnnnnnnnnnnnnnnnnnnnnnnnnnnnnnnnnnnnnnnnnnnnnnnnnnnnnnnnnnnnnnnnnnnnnnnnnnnnnnnnnnnnnnnnnnnnnnnnnnnnnnnnnnnnnnnnnnnnnnnnnnnnnnnnnnnnnnnnnnnnnnnnnnnnnnnnnnnnnnnnnnnnnnnnnnnnnnnnnnnnnnnnnnnnnnnnnnnnnnnnnnnnnnnnnnnnnnnnnnnnnnnnnnnnnnnnnnnnnnnnnnnnnnnnnnnnnnnnnnnnnnnnnnnnnnnnnnnnnnnnnnnnnnnnnnnnnnnnnnnnnnnnnnnnnnnnnnnnnnnnnnnnnnnnnnnnnnnnnnnnnnnnnnnnnnnnnnnnnnnnnnnnnnnnnnnnnnnnnnnnnnnnnnnnnnnnnnnnnnnnnnnnnnnnnnnnnnnnnnnnnnnnnnnnnnnnnnnnnnnnnnnnnnnnnnnnnnnnnnnnnnnnnnnnnnnnnnnnnnnnnnnnnnnnnnnnnnnnnnnnnnnnnnnnnnnnnnnnnnnnnnnnnnnnnnnnnnnnnnnnnnnnnnnnnnnnnnnnnnnnnnnnnnnnnnnnnnnnnnnnnnnnnnnnnnnnnnnnnnnnnnnnnnnnnnnnnnnnnnnnnnnnnnnnnnnnnnnnnnnnnnnnnnnnnnnnnnnnnnnnnnnnnnnnnnnnnnnnnnnnnnnnnnnnnnnnnnnnnnnnnnnnnnnnnnnnnnnnnnnnnnnnnnnnnnnnnnnnnnnnnnnnnnnnnnnnnnnnnnnnnnnnnnnnnnnnnnnnnnnnnnnnnnnnnnnnnnnnnnnnnnnnnnnnnnnnnnnnnnnnnnnnnnnnnnnnnnnnnnnnnnnnnnnnnnnnnnnnnnnnnnnnnnnnnnnnnnnnnnnnnnnnnnnnnnnnnnnnnnnnnnnnnnnnnnnnnnnnnnnnnnnnnnnnnnnnnnnnnnnnnnnnnnnnnnnnnnnnnnnnnnnnnnnnnnnnnnnnnnnnnnnnnnnnnnnnnnnnnnnnnnnnnnnnnnnnnnnnnnnnnnnnnnnnnnnnnnnnnnnnnnnnnnnnnnnnnnnnnnnnnnnnnnnnnnnnnnnnnnnnnnnnnnnnnnnnnnnnnnnnnnnnnnnnnnnnnnnnnnnnnnnnnnnnnnnnnnnnnnnnnnnnnnnnnnnnnnnnnnnnnnnnnnnnnnnnnnnnnnnnnnnnnnnnnnnnnnnnnnnnnnnnnnnnnnnnnnnnnnnnnnnnnnnnnnnnnnnnnnnnnnnnnnnnnnnnnnnnnnnnnnnnnnnnnnnnnnnnnnnnnnnnnnnnnnnnnnnnnnnnnnnnnnnnnnnnnnnnnnnnnnnnnnnnnnnnnnnnnnnnnnnnnnnnnnnnnnnnnnnnnnnnnnnnnnnnnnnnnnnnnnnnnnnnnnnnnnnnnnnnnnnnnnnnnnnnnnnnnnnnnnnnnnnnnnnnnnnnnnnnnnnnnnnnnnnnnnnnnnnnnnnnnnnnnnnnnnnnnnnnnnnnnnnnnnnnnnnnnnnnnnnnnnnnnnnnnnnnnnnnnnnnnnnnnnnnnnnnnnnnnnnnnnnnnnnnnnnnnnnnnnnnnnnnnnnnnnnnnnnnnnnnnnnnnnnnnnnnnnnnnnnnnnnnnnnnnnnnnnnnnnnnnnnnnnnnnnnnnnnnnnnnnnnnnnnnnnnnnnnnnnnnnnnnnnnnnnnnnnnnnnnnnnnnnnnnnnnnnnnnnnnnnnnnnnnnnnnnnnnnnnnnnnnnnnnnnnnnnnnnnnnnnnnnnnnnnnnnnnnnnnnnnnnnnnnnnnnnnnnnnnnnnnnnnnnnnnnnnnnnnnnnnnnnnnnnnnnnnnnnnnnnnnnnnnnnnnnnnnnnnnnnnnnnnnnnnnnnnnnnnnnnnnnnnnnnnnnnnnnnnnnnnnnnnnnnnnnnnnnnnnnnnnnnnnnnnnnnnnnnnnnnnnnnnnnnnnnnnnnnnnnnnnnnnnnnnnnnnnnnnnnnnnnnnnnnnnnnnnnnnnnnnnnnnnnnnnnnnnnnnnnnnnnnnnnnnnnnnnnnnnnnnnnnnnnnnnnnnnnnnnnnnnnnnnnnnnnnnnnnnnnnnnnnnnnnnnnnnnnnnnnnnnnnnnnnnnnnnnnnnnnnnnnnnnnnnnnnnnnnnnnnnnnnnnnnnnnnnnnnnnnnnnnnnnnnnnnnnnnnnnnnnnnnnnnnnnnnnnnnnnnnnnnnnnnnnnnnnnnnnnnnnnnnnnnnnnnnnnnnnnnnnnnnnnnnnnnnnnnnnnnnnnnnnnnnnnnnnnnnnnnnnnnnnnnnnnnnnnnnnnnnnnnnnnnnnnnnnnnnnnnnnnnnnnnnnnnnnnnnnnnnnnnnnnnnnnnnnnnnnnnnnnnnnnnnnnnnnnnnnnnnnnnnnnnnnnnnnnnnnnnnnnnnnnnnnnnnnnnnnnnnnnnnnnnnnnnnnnnnnnnnnnnnnnnnnnnnnnnnnnnnnnnnnnnnnnnnnnnnnnnnnnnnnnnnnnnnnnnnnnnnnnnnnnnnnnnnnnnnnnnnnnnnnnnnnnnnnnnnnnnnnnnnnnnnnnnnnnnnnnnnnnnnnnnnnnnnnnnnnnnnnnnnnnnnnnnnnnnnnnnnnnnnnnnnnnnnnnnnnnnnnnnnnnnnnnnnnnnnnnnnnnnnnnnnnnnnnnnnnnnnnnnnnnnnnnnnnnnnnnnnnnnnnnnnnnnnnnnnnnnnnnnnnnnnnnnnnnnnnnnnnnnnnnnnnnnnnnnnnnnnnnnnnnnnnnnnnnnnnnnnnnnnnnnnnnnnnnnnnnnnnnnnnnnnnnnnnnnnnnnnnnnnnnnnnnnnnnnnnnnnnnnnnnnnnnnnnnnnnnnnnnnnnnnnnnnnnnnnnnnnnnnnnnnnnnnnnnnnnnnnnnnnnnnnnnnnnnnnnnnnnnnnnnnnnnnnnnnnnnnnnnnnnnnnnnnnnnnnnnnnnnnnnnnnnnnnnnnnnnnnnnnnnnnnnnnnnnnnnnnnnnnnnnnnnnnnnnnnnnnnnnnnnnnnnnnnnnnnnnnnnnnnnnnnnnnnnnnnnnnnnnnnnnnnnnnnnnnnnnnnnnnnnnnnnnnnnnnnnnnnnnnnnnnnnnnnnnnnnnnnnnnnnnnnnnnnnnnnnnnnnnnnnnnnnnnnnnnnnnnnnnnnnnnnnnnnnnnnnnnnnnnnnnnnnnnnnnnnnnnnnnnnnnnnnnnnnnnnnnnnnnnnnnnnnnnnnnnnnnnnnnnnnnnnnnnnnnnnnnnnnnnnnnnnnnnnnnnnnnnnnnnnnnnnnnnnnnnnnnnnnnnnnnnnnnnnnnnnnnnnnnnnnnnnnnnnnnnnnnnnnnnnnnnnnnnnnnnnnnnnnnnnnnnnnnnnnnnnnnnnnnnnnnnnnnnnnnnnnnnnnnnnnnnnnnnnnnnnnnnnnnnnnnnnnnnnnnnnnnnnnnnnnnnnnnnnnnnnnnnnnnnnnnnnnnnnnnnnnnnnnnnnnnnnnnnnnnnnnnnnnnnnnnnnnnnnnnnnnnnnnnnnnnnnnnnnnnnnnnnnnnnnnnnnnnnnnnnnnnnnnnnnnnnnnnnnnnnnnnnnnnnnnnnnnnnnnnnnnnnnnnnnnnnnnnnnnnnnnnnnnnnnnnnnnnnnnnnnnnnnnnnnnnnnnnnnnnnnnnnnnnnnnnnnnnnnnnnnnnnnnnnnnnnnnnnnnnnnnnnnnnnnnnnnnnnnnnnnnnnnnnnnnnnnnnnnnnnnnnnnnnnnnnnnnnnnnnnnnnnnnnnnnnnnnnnnnnnnnnnnnnnnnnnnnnnnnnnnnnnnnnnnnnnnnnnnnnnnnnnnnnnnnnnnnnnnnnnnnnnnnnnnnnnnnnnnnnnnnnnnnnnnnnnnnnnnnnnnnnnnnnnnnnnnnnnnnnnnnnnnnnnnnnnnnnnnnnnnnnnnnnnnnnnnnnnnnnnnnnnnnnnnnnnnnnnnnnnnnnnnnnnnnnnnnnnnnnnnnnnnnnnnnnnnnnnnnnnnnnnnnnnnnnnnnnnnnnnnnnnnnnnnnnnnnnnnnnnnnnnnnnnnnnnnnnnnnnnnnnnnnnnnnnnnnnnnnnnnnnnnnnnnnnnnnnnnnnnnnnnnnnnnnnnnnnnnnnnnnnnnnnnnnnnnnnnnnnnnnnnnnnnnnnnnnnnnnnnnnnnnnnnnnnnnnnnnnnnnnnnnnnnnnnnnnnnnnnnnnnnnnnnnnnnnnnnnnnnnnnnnnnnnnnnnnnnnnnnnnnnnnnnnnnnnnnnnnnnnnnnnnnnnnnnnnnnnnnnnnnnnnnnnnnnnnnnnnnnnnnnnnnnnnnnnnnnnnnnnnnnnnnnnnnnnnnnnnnnnnnnnnnnnnnnnnnnnnnnnnnnnnnnnnnnnnnnnnnnnnnnnnnnnnnnnnnnnnnnnnnnnnnnnnnnnnnnnnnnnnnnnnnnnnnnnnnnnnnnnnnnnnnnnnnnnnnnnnnnnnnnnnnnnnnnnnnnnnnnnnnnnnnnnnnnnnnnnnnnnnnnnnnnnnnnnnnnnnnnnnnnnnnnnnnnnnnnnnnnnnnnnnnnnnnnnnnnnnnnnnnnnnnnnnnnnnnnnnnnnnnnnnnnnnnnnnnnnnnnnnnnnnnnnnnnnnnnnnnnnnnnnnnnnnnnnnnnnnnnnnnnnnnnnnnnnnnnnnnnnnnnnnnnnnnnnnnnnnnnnnnnnnnnnnnnnnnnnnnnnnnnnnnnnnnnnnnnnnnnnnnnnnnnnnnnnnnnnnnnnnnnnnnnnnnnnnnnnnnnnnnnnnnnnnnnnnnnnnnnnnnnnnnnnnnnnnnnnnnnnnnnnnnnnnnnnnnnnnnnnnnnnnnnnnnnnnnnnnnnnnnnnnnnnnnnnnnnnnnnnnnnnnnnnnnnnnnnnnnnnnnnnnnnnnnnnnnnnnnnnnnnnnnnnnnnnnnnnnnnnnnnnnnnnnnnnnnnnnnnnnnnnnnnnnnnnnnnnnnnnnnnnnnnnnnnnnnnnnnnnnnnnnnnnnnnnnnnnnnnnnnnnnnnnnnnnnnnnnnnnnnnnnnnnnnnnnnnnnnnnnnnnnnnnnnnnnnnnnnnnnnnnnnnnnnnnnnnnnnnnnnnnnnnnnnnnnnnnnnnnnnnnnnnnnnnnnnnnnnnnnnnnnnnnnnnnnnnnnnnnnnnnnnnnnnnnnnnnnnnnnnnnnnnnnnnnnnnnnnnnnnnnnnnnnnnnnnnnnnnnnnnnnnnnnnnnnnnnnnnnnnnnnnnnnnnnnnnnnnnnnnnnnnnnnnnnnnnnnnnnnnnnnnnnnnnnnnnnnnnnnnnnnnnnnnnnnnnnnnnnnnnnnnnnnnnnnnnnnnnnnnnnnnnnnnnnnnnnnnnnnnnnnnnnnnnnnnnnnnnnnnnnnnnnnnnnnnnnnnnnnnnnnnnnnnnnnnnnnnnnnnnnnnnnnnnnnnnnnnnnnnnnnnnnnnnnnnnnnnnnnnnnnnnnnnnnnnnnnnnnnnnnnnnnnnnnnnnnnnnnnnnnnnnnnnnnnnnnnnnnnnnnnnnnnnnnnnnnnnnnnnnnnnnnnnnnnnnnnnnnnnnnnnnnnnnnnnnnnnnnnnnnnnnnnnnnnnnnnnnnnnnnnnnnnnnnnnnnnnnnnnnnnnnnnnnnnnnnnnnnnnnnnnnnnnnnnnnnnnnnnnnnnnnnnnnnnnnnnnnnnnnnnnnnnnnnnnnnnnnnnnnnnnnnnnnnnnnnnnnnnnnnnnnnnnnnnnnnnnnnnnnnnnnnnnnnnnnnnnnnnnnnnnnnnnnnnnnnnnnnnnnnnnnnnnnnnnnnnnnnnnnnnnnnnnnnnnnnnnnnnnnnnnnnnnnnnnnnnnnnnnnnnnnnnnnnnnnnnnnnnnnnnnnnnnnnnnnnnnnnnnnnnnnnnnnnnnnnnnnnnnnnnnnnnnnnnnnnnnnnnnnnnnnnnnnnnnnnnnnnnnnnnnnnnnnnnnnnnnnnnnnnnnnnnnnnnnnnnnnnnnnnnnnnnnnnnnnnnnnnnnnnnnnnnnnnnnnnnnnnnnnnnnnnnnnnnnnnnnnnnnnnnnnnnnnnnnnnnnnnnnnnnnnnnnnnnnnnnnnnnnnnnnnnnnnnnnnnnnnnnnnnnnnnnnnnnnnnnnnnnnnnnnnnnnnnnnnnnnnnnnnnnnnnnnnnnnnnnnnnnnnnnnnnnnnnnnnnnnnnnnnnnnnnnnnnnnnnnnnnnnnnnnnnnnnnnnnnnnnnnnnnnnnnnnnnnnnnnnnnnnnnnnnnnnnnnnnnnnnnnnnnnnnnnnnnnnnnnnnnnnnnnnnnnnnnnnnnnnnnnnnnnnnnnnnnnnnnnnnnnnnnnnnnnnnnnnnnnnnnnnnnnnnnnnnnnnnnnnnnnnnnnnnnnnnnnnnnnnnnnnnnnnnnnnnnnnnnnnnnnnnnnnnnnnnnnnnnnnnnnnnnnnnnnnnnnnnnnnnnnnnnnnnnnnnnnnnnnnnnnnnnnnnnnnnnnnnnnnnnnnnnnnnnnnnnnnnnnnnnnnnnnnnnnnnnnnnnnnnnnnnnnnnnnnnnnnnnnnnnnnnnnnnnnnnnnnnnnnnnnnnnnnnnnnnnnnnnnnnnnnnnnnnnnnnnnnnnnnnnnnnnnnnnnnnnnnnnnnnnnnnnnnnnnnnnnnnnnnnnnnnnnnnnnnnnnnnnnnnnnnnnnnnnnnnnnnnnnnnnnnnnnnnnnnnnnnnnnnnnnnnnnnnnnnnnnnnnnnnnnnnnnnnnnnnnnnnnnnnnnnnnnnnnnnnnnnnnnnnnnnnnnnnnnnnnnnnnnnnnnnnnnnnnnnnnnnnnnnnnnnnnnnnnnnnnnnnnnnnnnnnnnnnnnnnnnnnnnnnnnnnnnnnnnnnnnnnnnnnnnnnnnnnnnnnnnnnnnnnnnnnnnnnnnnnnnnnnnnnnnnnnnnnnnnnnnnnnnnnnnnnnnnnnnnnnnnnnnnnnnnnnnnnnnnnnnnnnnnnnnnnnnnnnnnnnnnnnnnnnnnnnnnnnnnnnnnnnnnnnnnnnnnnnnnnnnnnnnnnnnnnnnnnnnnnnnnnnnnnnnnnnnnnnnnnnnnnnnnnnnnnnnnnnnnnnnnnnnnnnnnnnnnnnnnnnnnnnnnnnnnnnnnnnnnnnnnnnnnnnnnnnnnnnnnnnnnnnnnnnnnnnnnnnnnnnnnnnnnnnnnnnnnnnnnnnnnnnnnnnnnnnnnnnnnnnnnnnnnnnnnnnnnnnnnnnnnnnnnnnnnnnnnnnnnnnnnnnnnnnnnnnnnnnnnnnnnnnnnnnnnnnnnnnnnnnnnnnnnnnnnnnnnnnnnnnnnnnnnnnnnnnnnnnnnnnnnnnnnnnnnnnnnnnnnnnnnnnnnnnnnnnnnnnnnnnnnnnnnnnnnnnnnnnnnnnnnnnnnnnnnnnnnnnnnnnnnnnnnnnnnnnnnnnnnnnnnnnnnnnnnnnnnnnnnnnnnnnnnnnnnnnnnnnnnnnnnnnnnnnnnnnnnnnnnnnnnnnnnnnnnnnnnnnnnnnnnnnnnnnnnnnnnnnnnnnnnnnnnnnnnnnnnnnnnnnnnnnnnnnnnnnnnnnnnnnnnnnnnnnnnnnnnnnnnnnnnnnnnnnnnnnnnnnnnnnnnnnnnnnnnnnnnnnnnnnnnnnnnnnnnnnnnnnnnnnnnnnnnnnnnnnnnnnnnnnnnnnnnnnnnnnnnnnnnnnnnnnnnnnnnnnnnnnnnnnnnnnnnnnnnnnnnnnnnnnnnnnnnnnnnnnnnnnnnnnnnnnnnnnnnnnnnnnnnnnnnnnnnnnnnnnnnnnnnnnnnnnnnnnnnnnnnnnnnnnnnnnnnnnnnnnnnnnnnnnnnnnnnnnnnnnnnnnnnnnnnnnnnnnnnnnnnnnnnnnnnnnnnnnnnnnnnnnnnnnnnnnnnnnnnnnnnnnnnnnnnnnnnnnnnnnnnnnnnnnnnnnnnnnnnnnnnnnnnnnnnnnnnnnnnnnnnnnnnnnnnnnnnnnnnnnnnnnnnnnnnnnnnnnnnnnnnnnnnnnnnnnnnnnnnnnnnnnnnnnnnnnnnnnnnnnnnnnnnnnnnnnnnnnnnnnnnnnnnnnnnnnnnnnnnnnnnnnnnnnnnnnnnnnnnnnnnnnnnnnnnnnnnnnnnnnnnnnnnnnnnnnnnnnnnnnnnnnnnnnnnnnnnnnnnnnnnnnnnnnnnnnnnnnnnnnnnnnnnnnnnnnnnnnnnnnnnnnnnnnnnnnnnnnnnnnnnnnnnnnnnnnnnnnnnnnnnnnnnnnnnnnnnnnnnnnnnnnnnnnnnnnnnnnnnnnnnnnnnnnnnnnnnnnnnnnnnnnnnnnnnnnnnnnnnnnnnnnnnnnnnnnnnnnnnnnnnnnnnnnnnnnnnnnnnnnnnnnnnnnnnnnnnnnnnnnnnnnnnnnnnnnnnnnnnnnnnnnnnnnnnnnnnnnnnnnnnnnnnnnnnnnnnnnnnnnnnnnnnnnnnnnnnnnnnnnnnnnnnnnnnnnnnnnnnnnnnnnnnnnnnnnnnnnnnnnnnnnnnnnnnnnnnnnnnnnnnnnnnnnnnnnnnnnnnnnnnnnnnnnnnnnnnnnnnnnnnnnnnnnnnnnnnnnnnnnnnnnnnnnnnnnnnnnnnnnnnnnnnnnnnnnnnnnnnnnnnnnnnnnnnnnnnnnnnnnnnnnnnnnnnnnnnnnnnnnnnnnnnnnnnnnnnnnnnnnnnnnnnnnnnnnnnnnnnnnnnnnnnnnnnnnnnnnnnnnnnnnnnnnnnnnnnnnnnnnnnnnnnnnnnnnnnnnnnnnnnnnnnnnnnnnnnnnnnnnnnnnnnnnnnnnnnnnnnnnnnnnnnnnnnnnnnnnnnnnnnnnnnnnnnnnnnnnnnnnnnnnnnnnnnnnnnnnnnnnnnnnnnnnnnnnnnnnnnnnnnnnnnnnnnnnnnnnnnnnnnnnnnnnnnnnnnnnnnnnnnnnnnnnnnnnnnnnnnnnnnnnnnnnnnnnnnnnnnnnnnnnnnnnnnnnnnnnnnnnnnnnnnnnnnnnnnnnnnnnnnnnnnnnnnnnnnnnnnnnnnnnnnnnnnnnnnnnnnnnnnnnnnnnnnnnnnnnnnnnnnnnnnnnnnnnnnnnnnnnnnnnnnnnnnnnnnnnnnnnnnnnnnnnnnnnnnnnnnnnnnnnnnnnnnnnnnnnnnnnnnnnnnnnnnnnnnnnnnnnnnnnnnnnnnnnnnnnnnnnnnnnnnnnnnnnnnnnnnnnnnnnnnnnnnnnnnnnnnnnnnnnnnnnnnnnnnnnnnnnnnnnnnnnnnnnnnnnnnnnnnnnnnnnnnnnnnnnnnnnnnnnnnnnnnnnnnnnnnnnnnnnnnnnnnnnnnnnnnnnnnnnnnnnnnnnnnnnnnnnnnnnnnnnnnnnnnnnnnnnnnnnnnnnnnnnnnnnnnnnnnnnnnnnnnnnnnnnnnnnnnnnnnnnnnnnnnnnnnnnnnnnnnnnnnnnnnnnnnnnnnnnnnnnnnnnnnnnnnnnnnnnnnnnnnnnnnnnnnnnnnnnnnnnnnnnnnnnnnnnnnnnnnnnnnnnnnnnnnnnnnnnnnnnnnnnnnnnnnnnnnnnnnnnnnnnnnnnnnnnnnnnnnnnnnnnnnnnnnnnnnnnnnnnnnnnnnnnnnnnnnnnnnnnnnnnnnnnnnnnnnnnnnnnnnnnnnnnnnnnnnnnnnnnnnnnnnnnnnnnnnnnnnnnnnnnnnnnnnnnnnnnnnnnnnnnnnnnnnnnnnnnnnnnnnnnnnnnnnnnnnnnnnnnnnnnnnnnnnnnnnnnnnnnnnnnnnnnnnnnnnnnnnnnnnnnnnnnnnnnnnnnnnnnnnnnnnnnnnnnnnnnnnnnnnnnnnnnnnnnnnnnnnnnnnnnnnnnnnnnnnnnnnnnnnnnnnnnnnnnnnnnnnnnnnnnnnnnnnnnnnnnnnnnnnnnnnnnnnnnnnnnnnnnnnnnnnnnnnnnnnnnnnnnnnnnnnnnnnnnnnnnnnnnnnnnnnnnnnnnnnnnnnnnnnnnnnnnnnnnnnnnnnnnnnnnnnnnnnnnnnnnnnnnnnnnnnnnnnnnnnnnnnnnnnnnnnnnnnnnnnnnnnnnnnnnnnnnnnnnnnnnnnnnnnnnnnnnnnnnnnnnnnnnnnnnnnnnnnnnnnnnnnnnnnnnnnnnnnnnnnnnnnnnnnnnnnnnnnnnnnnnnnnnnnnnnnnnnnnnnnnnnnnnnnnnnnnnnnnnnnnnnnnnnnnnnnnnnnnnnnnnnnnnnnnnnnnnnnnnnnnnnnnnnnnnnnnnnnnnnnnnnnnnnnnnnnnnnnnnnnnnnnnnnnnnnnnnnnnnnnnnnnnnnnnnnnnnnnnnnnnnnnnnnnnnnnnnnnnnnnnnnnnnnnnnnnnnnnnnnnnnnnnnnnnnnnnnnnnnnnnnnnnnnnnnnnnnnnnnnnnnnnnnnnnnnnnnnnnnnnnnnnnnnnnnnnnnnnnnnnnnnnnnnnnnnnnnnnnnnnnnnnnnnnnnnnnnnnnnnnnnnnnnnnnnnnnnnnnnnnnnnnnnnnnnnnnnnnnnnnnnnnnnnnnnnnnnnnnnnnnnnnnnnnnnnnnnnnnnnnnnnnnnnnnnnnnnnnnnnnnnnnnnnnnnnnnnnnnnnnnnnnnnnnnnnnnnnnnnnnnnnnnnnnnnnnnnnnnnnnnnnnnnnnnnnnnnnnnnnnnnnnnnnnnnnnnnnnnnnnnnnnnnnnnnnnnnnnnnnnnnnnnnnnnnnnnnnnnnnnnnnnnnnnnnnnnnnnnnnnnnnnnnnnnnnnnnnnnnnnnnnnnnnnnnnnnnnnnnnnnnnnnnnnnnnnnnnnnnnnnnnnnnnnnnnnnnnnnnnnnnnnnnnnnnnnnnnnnnnnnnnnnnnnnnnnnnnnnnnnnnnnnnnnnnnnnnnnnnnnnnnnnnnnnnnnnnnnnnnnnnnnnnnnnnnnnnnnnnnnnnnnnnnnnnnnnnnnnnnnnnnnnnnnnnnnnnnnnnnnnnnnnnnnnnnnnnnnnnnnnnnnnnnnnnnnnnnnnnnnnnnnnnnnnnnnnnnnnnnnnnnnnnnnnnnnnnnnnnnnnnnnnnnnnnnnnnnnnnnnnnnnnnnnnnnnnnnnnnnnnnnnnnnnnnnnnnnnnnnnnnnnnnnnnnnnnnnnnnnnnnnnnnnnnnnnnnnnnnnnnnnnnnnnnnnnnnnnnnnnnnnnnnnnnnnnnnnnnnnnnnnnnnnnnnnnnnnnnnnnnnnnnnnnnnnnnnnnnnnnnnnnnnnnnnnnnnnnnnnnnnnnnnnnnnnnnnnnnnnnnnnnnnnnnnnnnnnnnnnnnnnnnnnnnnnnnnnnnnnnnnnnnnnnnnnnnnnnnnnnnnnnnnnnnnnnnnnnnnnnnnnnnnnnnnnnnnnnnnnnnnnnnnnnnnnnnnnnnnnnnnnnnnnnnnnnnnnnnnnnnnnnnnnnnnnnnnnnnnnnnnnnnnnnnnnnnnnnnnnnnnnnnnnnnnnnnnnnnnnnnnnnnnnnnnnnnnnnnnnnnnnnnnnnnnnnnnnnnnnnnnnnnnnnnnnnnnnnnnnnnnnnnnnnnnnnnnnnnnnnnnnnnnnnnnnnnnnnnnnnnnnnnnnnnnnnnnnnnnnnnnnnnnnnnnnnnnnnnnnnnnnnnnnnnnnnnnnnnnnnnnnnnnnnnnnnnnnnnnnnnnnnnnnnnnnnnnnnnnnnnnnnnnnnnnnnnnnnnnnnnnnnnnnnnnnnnnnnnnnnnnnnnnnnnnnnnnnnnnnnnnnnnnnnnnnnnnnnnnnnnnnnnnnnnnnnnnnnnnnnnnnnnnnnnnnnnnnnnnnnnnnnnnnnnnnnnnnnnnnnnnnnnnnnnnnnnnnnnnnnnnnnnnnnnnnnnnnnnnnnnnnnnnnnnnnnnnnnnnnnnnnnnnnnnnnnnnnnnnnnnnnnnnnnnnnnnnnnnnnnnnnnnnnnnnnnnnnnnnnnnnnnnnnnnnnnnnnnnnnnnnnnnnnnnnnnnnnnnnnnnnnnnnnnnnnnnnnnnnnnnnnnnnnnnnnnnnnnnnnnnnnnnnnnnnnnnnnnnnnnnnnnnnnnnnnnnnnnnnnnnnnnnnnnnnnnnnnnnnnnnnnnnnnnnnnnnnnnnnnnnnnnnnnnnnnnnnnnnnnnnnnnnnnnnnnnnnnnnnnnnnnnnnnnnnnnnnnnnnnnnnnnnnnnnnnnnnnnnnnnnnnnnnnnnnnnnnnnnnnnnnnnnnnnnnnnnnnnnnnnnnnnnnnnnnnnnnnnnnnnnnnnnnnnnnnnnnnnnnnnnnnnnnnnnnnnnnnnnnnnnnnnnnnnnnnnnnnnnnnnnnnnnnnnnnnnnnnnnnnnnnnnnnnnnnnnnnnnnnnnnnnnnnnnnnnnnnnnnnnnnnnnnnnnnnnnnnnnnnnnnnnnnnnnnnnnnnnnnnnnnnnnnnnnnnnnnnnnnnnnnnnnnnnnnnnnnnnnnnnnnnnnnnnnnnnnnnnnnnnnnnnnnnnnnnnnnnnnnnnnnnnnnnnnnnnnnnnnnnnnnnnnnnnnnnnnnnnnnnnnnnnnnnnnnnnnnnnnnnnnnnnnnnnnnnnnnnnnnnnnnnnnnnnnnnnnnnnnnnnnnnnnnnnnnnnnnnnnnnnnnnnnnnnnnnnnnnnnnnnnnnnnnnnnnnnnnnnnnnnnnnnnnnnnnnnnnnnnnnnnnnnnnnnnnnnnnnnnnnnnnnnnnnnnnnnnnnnnnnnnnnnnnnnnnnnnnnnnnnnnnnnnnnnnnnnnnnnnnnnnnnnnnnnnnnnnnnnnnnnnnnnnnnnnnnnnnnnnnnnnnnnnnnnnnnnnnnnnnnnnnnnnnnnnnnnnnnnnnnnnnnnnnnnnnnnnnnnnnnnnnnnnnnnnnnnnnnnnnnnnnnnnnnnnnnnnnnnnnnnnnnnnnnnnnnnnnnnnnnnnnnnnnnnnnnnnnnnnnnnnnnnnnnnnnnnnnnnnnnnnnnnnnnnnnnnnnnnnnnnnnnnnnnnnnnnnnnnnnnnnnnnnnnnnnnnnnnnnnnnnnnnnnnnnnnnnnnnnnnnnnnnnnnnnnnnnnnnnnnnnnnnnnnnnnnnnnnnnnnnnnnnnnnnnnnnnnnnnnnnnnnnnnnnnnnnnnnnnnnnnnnnnnnnnnnnnnnnnnnnnnnnnnnnnnnnnnnnnnnnnnnnnnnnnnnnnnnnnnnnnnnnnnnnnnnnnnnnnnnnnnnnnnnnnnnnnnnnnnnnnnnnnnnnnnnnnnnnnnnnnnnnnnnnnnnnnnnnnnnnnnnnnnnnnnnnnnnnnnnnnnnnnnnnnnnnnnnnnnnnnnnnnnnnnnnnnnnnnnnnnnnnnnnnnnnnnnnnnnnnnnnnnnnnnnnnnnnnnnnnnnnnnnnnnnnnnnnnnnnnnnnnnnnnnnnnnnnnnnnnnnnnnnnnnnnnnnnnnnnnnnnnnnnnnnnnnnnnnnnnnnnnnnnnnnnnnnnnnnnnnnnnnnnnnnnnnnnnnnnnnnnnnnnnnnnnnnnnnnnnnnnnnnnnnnnnnnnnnnnnnnnnnnnnnnnnnnnnnnnnnnnnnnnnnnnnnnnnnnnnnnnnnnnnnnnnnnnnnnnnnnnnnnnnnnnnnnnnnnnnnnnnnnnnnnnnnnnnnnnnnnnnnnnnnnnnnnnnnnnnnnnnnnnnnnnnnnnnnnnnnnnnnnnnnnnnnnnnnnnnnnnnnnnnnnnnnnnnnnnnnnnnnnnnnnnnnnnnnnnnnnnnnnnnnnnnnnnnnnnnnnnnnnnnnnnnnnnnnnnnnnnnnnnnnnnnnnnnnnnnnnnnnnnnnnnnnnnnnnnnnnnnnnnnnnnnnnnnnnnnnnnnnnnnnnnnnnnnnnnnnnnnnnnnnnnnnnnnnnnnnnnnnnnnnnnnnnnnnnnnnnnnnnnnnnnnnnnnnnnnnnnnnnnnnnnnnnnnnnnnnnnnnnnnnnnnnnnnnnnnnnnnnnnnnnnnnnnnnnnnnnnnnnnnnnnnnnnnnnnnnnnnnnnnnnnnnnnnnnnnnnnnnnnnnnnnnnnnnnnnnnnnnnnnnnnnnnnnnnnnnnnnnnnnnnnnnnnnnnnnnnnnnnnnnnnnnnnnnnnnnnnnnnnnnnnnnnnnnnnnnnnnnnnnnnnnnnnnnnnnnnnnnnnnnnnnnnnnnnnnnnnnnnnnnnnnnnnnnnnnnnnnnnnnnnnnnnnnnnnnnnnnnnnnnnnnnnnnnnnnnnnnnnnnnnnnnnnnnnnnnnnnnnnnnnnnnnnnnnnnnnnnnnnnnnnnnnnnnnnnnnnnnnnnnnnnnnnnnnnnnnnnnnnnnnnnnnnnnnnnnnnnnnnnnnnnnnnnnnnnnnnnnnnnnnnnnnnnnnnnnnnnnnnnnnnnnnnnnnnnnnnnnnnnnnnnnnnnnnnnnnnnnnnnnnnnnnnnnnnnnnnnnnnnnnnnnnnnnnnnnnnnnnnnnnnnnnnnnnnnnnnnnnnnnnnnnnnnnnnnnnnnnnnnnnnnnnnnnnnnnnnnnnnnnnnnnnnnnnnnnnnnnnnnnnnnnnnnnnnnnnnnnnnnnnnnnnnnnnnnnnnnnnnnnnnnnnnnnnnnnnnnnnnnnnnnnnnnnnnnnnnnnnnnnnnnnnnnnnnnnnnnnnnnnnnnnnnnnnnnnnnnnnnnnnnnnnnnnnnnnnnnnnnnnnnnnnnnnnnnnnnnnnnnnnnnnnnnnnnnnnnnnnnnnnnnnnnnnnnnnnnnnnnnnnnnnnnnnnnnnnnnnnnnnnnnnnnnnnnnnnnnnnnnnnnnnnnnnnnnnnnnnnnnnnnnnnnnnnnnnnnnnnnnnnnnnnnnnnnnnnnnnnnnnnnnnnnnnnnnnnnnnnnnnnnnnnnnnnnnnnnnnnnnnnnnnnnnnnnnnnnnnnnnnnnnnnnnnnnnnnnnnnnnnnnnnnnnnnnnnnnnnnnnnnnnnnnnnnnnnnnnnnnnnnnnnnnnnnnnnnnnnnnnnnnnnnnnnnnnnnnnnnnnnnnnnnnnnnnnnnnnnnnnnnnnnnnnnnnnnnnnnnnnnnnnnnnnnnnnnnnnnnnnnnnnnnnnnnnnnnnnnnnnnnnnnnnnnnnnnnnnnnnnnnnnnnnnnnnnnnnnnnnnnnnnnnnnnnnnnnnnnnnnnnnnnnnnnnnnnnnnnnnnnnnnnnnnnnnnnnnnnnnnnnnnnnnnnnnnnnnnnnnnnnnnnnnnnnnnnnnnnnnnnnnnnnnnnnnnnnnnnnnnnnnnnnnnnnnnnnnnnnnnnnnnnnnnnnnnnnnnnnnnnnnnnnnnnnnnnnnnnnnnnnnnnnnnnnnnnnnnnnnnnnnnnnnnnnnnnnnnnnnnnnnnnnnnnnnnnnnnnnnnnnnnnnnnnnnnnnnnnnnnnnnnnnnnnnnnnnnnnnnnnnnnnnnnnnnnnnnnnnnnnnnnnnnnnnnnnnnnnnnnnnnnnnnnnnnnnnnnnnnnnnnnnnnnnnnnnnnnnnnnnnnnnnnnnnnnnnnnnnnnnnnnnnnnnnnnnnnnnnnnnnnnnnnnnnnnnnnnnnnnnnnnnnnnnnnnnnnnnnnnnnnnnnnnnnnnnnnnnnnnnnnnnnnnnnnnnnnnnnnnnnnnnnnnnnnnnnnnnnnnnnnnnnnnnnnnnnnnnnnnnnnnnnnnnnnnnnnnnnnnnnnnnnnnnnnnnnnnnnnnnnnnnnnnnnnnnnnnnnnnnnnnnnnnnnnnnnnnnnnnnnnnnnnnnnnnnnnnnnnnnnnnnnnnnnnnnnnnnnnnnnnnnnnnnnnnnnnnnnnnnnnnnnnnnnnnnnnnnnnnnnnnnnnnnnnnnnnnnnnnnnnnnnnnnnnnnnnnnnnnnnnnnnnnnnnnnnnnnnnnnnnnnnnnnnnnnnnnnnnnnnnnnnnnnnnnnnnnnnnnnnnnnnnnnnnnnnnnnnnnnnnnnnnnnnnnnnnnnnnnnnnnnnnnnnnnnnnnnnnnnnnnnnnnnnnnnnnnnnnnnnnnnnnnnnnnnnnnnnnnnnnnnnnnnnnnnnnnnnnnnnnnnnnnnnnnnnnnnnnnnnnnnnnnnnnnnnnnnnnnnnnnnnnnnnnnnnnnnnnnnnnnnnnnnnnnnnnnnnnnnnnnnnnnnnnnnnnnnnnnnnnnnnnnnnnnnnnnnnnnnnnnnnnnnnnnnnnnnnnnnnnnnnnnnnnnnnnnnnnnnnnnnnnnnnnnnnnnnnnnnnnnnnnnnnnnnnnnnnnnnnnnnnnnnnnnnnnnnnnnnnnnnnnnnnnnnnnnnnnnnnnnnnnnnnnnnnnnnnnnnnnnnnnnnnnnnnnnnnnnnnnnnnnnnnnnnnnnnnnnnnnnnnnnnnnnnnnnnnnnnnnnnnnnnnnnnnnnnnnnnnnnnnnnnnnnnnnnnnnnnnnnnnnnnnnnnnnnnnnnnnnnnnnnnnnnnnnnnnnnnnnnnnnnnnnnnnnnnnnnnnnnnnnnnnnnnnnnnnnnnnnnnnnnnnnnnnnnnnnnnnnnnnnnnnnnnnnnnnnnnnnnnnnnnnnnnnnnnnnnnnnnnnnnnnnnnnnnnnnnnnnnnnnnnnnnnnnnnnnnnnnnnnnnnnnnnnnnnnnnnnnnnnnnnnnnnnnnnnnnnnnnnnnnnnnnnnnnnnnnnnnnnnnnnnnnnnnnnnnnnnnnnnnnnnnnnnnnnnnnnnnnnnnnnnnnnnnnnnnnnnnnnnnnnnnnnnnnnnnnnnnnnnnnnnnnnnnnnnnnnnnnnnnnnnnnnnnnnnnnnnnnnnnnnnnnnnnnnnnnnnnnnnnnnnnnnnnnnnnnnnnnnnnnnnnnnnnnnnnnnnnnnnnnnnnnnnnnnnnnnnnnnnnnnnnnnnnnnnnnnnnnnnnnnnnnnnnnnnnnnnnnnnnnnnnnnnnnnnnnnnnnnnnnnnnnnnnnnnnnnnnnnnnnnnnnnnnnnnnnnnnnnnnnnnnnnnnnnnnnnnnnnnnnnnnnnnnnnnnnnnnnnnnnnnnnnnnnnnnnnnnnnnnnnnnnnnnnnnnnnnnnnnnnnnnnnnnnnnnnnnnnnnnnnnnnnnnnnnnnnnnnnnnnnnnnnnnnnnnnnnnnnnnnnnnnnnnnnnnnnnnnnnnnnnnnnnnnnnnnnnnnnnnnnnnnnnnnnnnnnnnnnnnnnnnnnnnnnnnnnnnnnnnnnnnnnnnnnnnnnnnnnnnnnnnnnnnnnnnnnnnnnnnnnnnnnnnnnnnnnnnnnnnnnnnnnnnnnnnnnnnnnnnnnnnnnnnnnnnnnnnnnnnnnnnnnnnnnnnnnnnnnnnnnnnnnnnnnnnnnnnnnnnnnnnnnnnnnnnnnnnnnnnnnnnnnnnnnnnnnnnnnnnnnnnnnnnnnnnnnnnnnnnnnnnnnnnnnnnnnnnnnnnnnnnnnnnnnnnnnnnnnnnnnnnnnnnnnnnnnnnnnnnnnnnnnnnnnnnnnnnnnnnnnnnnnnnnnnnnnnnnnnnnnnnnnnnnnnnnnnnnnnnnnnnnnnnnnnnnnnnnnnnnnnnnnnnnnnnnnnnnnnnnnnnnnnnnnnnnnnnnnnnnnnnnnnnnnnnnnnnnnnnnnnnnnnnnnnnnnnnnnnnnnnnnnnnnnnnnnnnnnnnnnnnnnnnnnnnnnnnnnnnnnnnnnnnnnnnnnnnnnnnnnnnnnnnnnnnnnnnnnnnnnnnnnnnnnnnnnnnnnnnnnnnnnnnnnnnnnnnnnnnnnnnnnnnnnnnnnnnnnnnnnnnnnnnnnnnnnnnnnnnnnnnnnnnnnnnnnnnnnnnnnnnnnnnnnnnnnnnnnnnnnnnnnnnnnnnnnnnnnnnnnnnnnnnnnnnnnnnnnnnnnnnnnnnnnnnnnnnnnnnnnnnnnnnnnnnnnnnnnnnnnnnnnnnnnnnnnnnnnnnnnnnnnnnnnnnnnnnnnnnnnnnnnnnnnnnnnnnnnnnnnnnnnnnnnnnnnnnnnnnnnnnnnnnnnnnnnnnnnnnnnnnnnnnnnnnnnnnnnnnnnnnnnnnnnnnnnnnnnnnnnnnnnnnnnnnnnnnnnnnnnnnnnnnnnnnnnnnnnnnnnnnnnnnnnnnnnnnnnnnnnnnnnnnnnnnnnnnnnnnnnnnnnnnnnnnnnnnnnnnnnnnnnnnnnnnnnnnnnnnnnnnnnnnnnnnnnnnnnnnnnnnnnnnnnnnnnnnnnnnnnnnnnnnnnnnnnnnnnnnnnnnnnnnnnnnnnnnnnnnnnnnnnnnnnnnnnnnnnnnnnnnnnnnnnnnnnnnnnnnnnnnnnnnnnnnnnnnnnnnnnnnnnnnnnnnnnnnnnnnnnnnnnnnnnnnnnnnnnnnnnnnnnnnnnnnnnnnnnnnnnnnnnnnnnnnnnnnnnnnnnnnnnnnnnnnnnnnnnnnnnnnnnnnnnnnnnnnnnnnnnnnnnnnnnnnnnnnnnnnnnnnnnnnnnnnnnnnnnnnnnnnnnnnnnnnnnnnnnnnnnnnnnnnnnnnnnnnnnnnnnnnnnnnnnnnnnnnnnnnnnnnnnnnnnnnnnnnnnnnnnnnnnnnnnnnnnnnnnnnnnnnnnnnnnnnnnnnnnnnnnnnnnnnnnnnnnnnnnnnnnnnnnnnnnnnnnnnnnnnnnnnnnnnnnnnnnnnnnnnnnnnnnnnnnnnnnnnnnnnnnnnnnnnnnnnnnnnnnnnnnnnnnnnnnnnnnnnnnnnnnnnnnnnnnnnnnnnnnnnnnnnnnnnnnnnnnnnnnnnnnnnnnnnnnnnnnnnnnnnnnnnnnnnnnnnnnnnnnnnnnnnnnnnnnnnnnnnnnnnnnnnnnnnnnnnnnnnnnnnnnnnnnnnnnnnnnnnnnnnnnnnnnnnnnnnnnnnnnnnnnnnnnnnnnnnnnnnnnnnnnnnnnnnnnnnnnnnnnnnnnnnnnnnnnnnnnnnnnnnnnnnnnnnnnnnnnnnnnnnnnnnnnnnnnnnnnnnnnnnnnnnnnnnnnnnnnnnnnnnnnnnnnnnnnnnnnnnnnnnnnnnnnnnnnnnnnnnnnnnnnnnnnnnnnnnnnnnnnnnnnnnnnnnnnnnnnnnnnnnnnnnnnnnnnnnnnnnnnnnnnnnnnnnnnnnnnnnnnnnnnnnnnnnnnnnnnnnnnnnnnnnnnnnnnnnnnnnnnnnnnnnnnnnnnnnnnnnnnnnnnnnnnnnnnnnnnnnnnnnnnnnnnnnnnnnnnnnnnnnnnnnnnnnnnnnnnnnnnnnnnnnnnnnnnnnnnnnnnnnnnnnnnnnnnnnnnnnnnnnnnnnnnnnnnnnnnnnnnnnnnnnnnnnnnnnnnnnnnnnnnnnnnnnnnnnnnnnnnnnnnnnnnnnnnnnnnnnnnnnnnnnnnnnnnnnnnnnnnnnnnnnnnnnnnnnnnnnnnnnnnnnnnnnnnnnnnnnnnnnnnnnnnnnnnnnnnnnnnnnnnnnnnnnnnnnnnnnnnnnnnnnnnnnnnnnnnnnnnnnnnnnnnnnnnnnnnnnnnnnnnnnnnnnnnnnnnnnnnnnnnnnnnnnnnnnnnnnnnnnnnnnnnnnnnnnnnnnnnnnnnnnnnnnnnnnnnnnnnnnnnnnnnnnnnnnnnnnnnnnnnnnnnnnnnnnnnnnnnnnnnnnnnnnnnnnnnnnnnnnnnnnnnnnnnnnnnnnnnnnnnnnnnnnnnnnnnnnnnnnnnnnnnnnnnnnnnnnnnnnnnnnnnnnnnnnnnnnnnnnnnnnnnnnnnnnnnnnnnnnnnnnnnnnnnnnnnnnnnnnnnnnnnnnnnnnnnnnnnnnnnnnnnnnnnnnnnnnnnnnnnnnnnnnnnnnnnnnnnnnnnnnnnnnnnnnnnnnnnnnnnnnnnnnnnnnnnnnnnnnnnnnnnnnnnnnnnnnnnnnnnnnnnnnnnnnnnnnnnnnnnnnnnnnnnnnnnnnnnnnnnnnnnnnnnnnnnnnnnnnnnnnnnnnnnnnnnnnnnnnnnnnnnnnnnnnnnnnnnnnnnnnnnnnnnnnnnnnnnnnnnnnnnnnnnnnnnnnnnnnnnnnnnnnnnnnnnnnnnnnnnnnnnnnnnnnnnnnnnnnnnnnnnnnnnnnnnnnnnnnnnnnnnnnnnnnnnnnnnnnnnnnnnnnnnnnnnnnnnnnnnnnnnnnnnnnnnnnnnnnnnnnnnnnnnnnnnnnnnnnnnnnnnnnnnnnnnnnnnnnnnnnnnnnnnnnnnnnnnnnnnnnnnnnnnnnnnnnnnnnnnnnnnnnnnnnnnnnnnnnnnnnnnnnnnnnnnnnnnnnnnnnnnnnnnnnnnnnnnnnnnnnnnnnnnnnnnnnnnnnnnnnnnnnnnnnnnnnnnnnnnnnnnnnnnnnnnnnnnnnnnnnnnnnnnnnnnnnnnnnnnnnnnnnnnnnnnnnnnnnnnnnnnnnnnnnnnnnnnnnnnnnnnnnnnnnnnnnnnnnnnnnnnnnnnnnnnnnnnnnnnnnnnnnnnnnnnnnnnnnnnnnnnnnnnnnnnnnnnnnnnnnnnnnnnnnnnnnnnnnnnnnnnnnnnnnnnnnnnnnnnnnnnnnnnnnnnnnnnnnnnnnnnnnnnnnnnnnnnnnnnnnnnnnnnnnnnnnnnnnnnnnnnnnnnnnnnnnnnnnnnnnnnnnnnnnnnnnnnnnnnnnnnnnnnnnnnnnnnnnnnnnnnnnnnnnnnnnnnnnnnnnnnnnnnnnnnnnnnnnnnnnnnnnnnnnnnnnnnnnnnnnnnnnnnnnnnnnnnnnnnnnnnnnnnnnnnnnnnnnnnnnnnnnnnnnnnnnnnnnnnnnnnnnnnnnnnnnnnnnnnnnnnnnnnnnnnnnnnnnnnnnnnnnnnnnnnnnnnnnnnnnnnnnnnnnnnnnnnnnnnnnnnnnnnnnnnnnnnnnnnnnnnnnnnnnnnnnnnnnnnnnnnnnnnnnnnnnnnnnnnnnnnnnnnnnnnnnnnnnnnnnnnnnnnnnnnnnnnnnnnnnnnnnnnnnnnnnnnnnnnnnnnnnnnnnnnnnnnnnnnnnnnnnnnnnnnnnnnnnnnnnnnnnnnnnnnnnnnnnnnnnnnnnnnnnnnnnnnnnnnnnnnnnnnnnnnnnnnnnnnnnnnnnnnnnnnnnnnnnnnnnnnnnnnnnnnnnnnnnnnnnnnnnnnnnnnnnnnnnnnnnnnnnnnnnnnnnnnnnnnnnnnnnnnnnnnnnnnnnnnnnnnnnnnnnnnnnnnnnnnnnnnnnnnnnnnnnnnnnnnnnnnnnnnnnnnnnnnnnnnnnnnnnnnnnnnnnnnnnnnnnnnnnnnnnnnnnnnnnnnnnnnnnnnnnnnnnnnnnnnnnnnnnnnnnnnnnnnnnnnnnnnnnnnnnnnnnnnnnnnnnnnnnnnnnnnnnnnnnnnnnnnnnnnnnnnnnnnnnnnnnnnnnnnnnnnnnnnnnnnnnnnnnnnnnnnnnnnnnnnnnnnnnnnnnnnnnnnnnnnnnnnnnnnnnnnnnnnnnnnnnnnnnnnnnnnnnnnnnnnnnnnnnnnnnnnnnnnnnnnnnnnnnnnnnnnnnnnnnnnnnnnnnnnnnnnnnnnnnnnnnnnnnnnnnnnnnnnnnnnnnnnnnnnnnnnnnnnnnnnnnnnnnnnnnnnnnnnnnnnnnnnnnnnnnnnnnnnnnnnnnnnnnnnnnnnnnnnnnnnnnnnnnnnnnnnnnnnnnnnnnnnnnnnnnnnnnnnnnnnnnnnnnnnnnnnnnnnnnnnnnnnnnnnnnnnnnnnnnnnnnnnnnnnnnnnnnnnnnnnnnnnnnnnnnnnnnnnnnnnnnnnnnnnnnnnnnnnnnnnnnnnnnnnnnnnnnnnnnnnnnnnnnnnnnnnnnnnnnnnnnnnnnnnnnnnnnnnnnnnnnnnnnnnnnnnnnnnnnnnnnnnnnnnnnnnnnnnnnnnnnnnnnnnnnnnnnnnnnnnnnnnnnnnnnnnnnnnnnnnnnnnnnnnnnnnnnnnnnnnnnnnnnnnnnnnnnnnnnnnnnnnnnnnnnnnnnnnnnnnnnnnnnnnnnnnnnnnnnnnnnnnnnnnnnnnnnnnnnnnnnnnnnnnnnnnnnnnnnnnnnnnnnnnnnnnnnnnnnnnnnnnnnnnnnnnnnnnnnnnnnnnnnnnnnnnnnnnnnnnnnnnnnnnnnnnnnnnnnnnnnnnnnnnnnnnnnnnnnnnnnnnnnnnnnnnnnnnnnnnnnnnnnnnnnnnnnnnnnnnnnnnnnnnnnnnnnnnnnnnnnnnnnnnnnnnnnnnnnnnnnnnnnnnnnnnnnnnnnnnnnnnnnnnnnnnnnnnnnnnnnnnnnnnnnnnnnnnnnnnnnnnnnnnnnnnnnnnnnnnnnnnnnnnnnnnnnnnnnnnnnnnnnnnnnnnnnnnnnnnnnnnnnnnnnnnnnnnnnnnnnnnnnnnnnnnnnnnnnnnnnnnnnnnnnnnnnnnnnnnnnnnnnnnnnnnnnnnnnnnnnnnnnnnnnnnnnnnnnnnnnnnnnnnnnnnnnnnnnnnnnnnnnnnnnnnnnnnnnnnnnnnnnnnnnnnnnnnnnnnnnnnnnnnnnnnnnnnnnnnnnnnnnnnnnnnnnnnnnnnnnnnnnnnnnnnnnnnnnnnnnnnnnnnnnnnnnnnnnnnnnnnnnnnnnnnnnnnnnnnnnnnnnnnnnnnnnnnnnnnnnnnnnnnnnnnnnnnnnnnnnnnnnnnnnnnnnnnnnnnnnnnnnnnnnnnnnnnnnnnnnnnnnnnnnnnnnnnnnnnnnnnnnnnnnnnnnnnnnnnnnnnnnnnnnnnnnnnnnnnnnnnnnnnnnnnnnnnnnnnnnnnnnnnnnnnnnnnnnnnnnnnnnnnnnnnnnnnnnnnnnnnnnnnnnnnnnnnnnnnnnnnnnnnnnnnnnnnnnnnnnnnnnnnnnnnnnnnnnnnnnnnnnnnnnnnnnnnnnnnnnnnnnnnnnnnnnnnnnnnnnnnnnnnnnnnnnnnnnnnnnnnnnnnnnnnnnnnnnnnnnnnnnnnnnnnnnnnnnnnnnnnnnnnnnnnnnnnnnnnnnnnnnnnnnnnnnnnnnnnnnnnnnnnnnnnnnnnnnnnnnnnnnnnnnnnnnnnnnnnnnnnnnnnnnnnnnnnnnnnnnnnnnnnnnnnnnnnnnnnnnnnnnnnnnnnnnnnnnnnnnnnnnnnnnnnnnnnnnnnnnnnnnnnnnnnnnnnnnnnnnnnnnnnnnnnnnnnnnnnnnnnnnnnnnnnnnnnnnnnnnnnnnnnnnnnnnnnnnnnnnnnnnnnnnnnnnnnnnnnnnnnnnnnnnnnnnnnnnnnnnnnnnnnnnnnnnnnnnnnnnnnnnnnnnnnnnnnnnnnnnnnnnnnnnnnnnnnnnnnnnnnnnnnnnnnnnnnnnnnnnnnnnnnnnnnnnnnnnnnnnnnnnnnnnnnnnnnnnnnnnnnnnnnnnnnnnnnnnnnnnnnnnnnnnnnnnnnnnnnnnnnnnnnnnnnnnnnnnnnnnnnnnnnnnnnnnnnnnnnnnnnnnnnnnnnnnnnnnnnnnnnnnnnnnnnnnnnnnnnnnnnnnnnnnnnnnnnnnnnnnnnnnnnnnnnnnnnnnnnnnnnnnnnnnnnnnnnnnnnnnnnnnnnnnnnnnnnnnnnnnnnnnnnnnnnnnnnnnnnnnnnnnnnnnnnnnnnnnnnnnnnnnnnnnnnnnnnnnnnnnnnnnnnnnnnnnnnnnnnnnnnnnnnnnnnnnnnnnnnnnnnnnnnnnnnnnnnnnnnnnnnnnnnnnnnnnnnnnnnnnnnnnnnnnnnnnnnnnnnnnnnnnnnnnnnnnnnnnnnnnnnnnnnnnnnnnnnnnnnnnnnnnnnnnnnnnnnnnnnnnnnnnnnnnnnnnnnnnnnnnnnnnnnnnnnnnnnnnnnnnnnnnnnnnnnnnnnnnnnnnnnnnnnnnnnnnnnnnnnnnnnnnnnnnnnnnnnnnnnnnnnnnnnnnnnnnnnnnnnnnnnnnnnnnnnnnnnnnnnnnnnnnnnnnnnnnnnnnnnnnnnnnnnnnnnnnnnnnnnnnnnnnnnnnnnnnnnnnnnnnnnnnnnnnnnnnnnnnnnnnnnnnnnnnnnnnnnnnnnnnnnnnnnnnnnnnnnnnnnnnnnnnnnnnnnnnnnnnnnnnnnnnnnnnnnnnnnnnnnnnnnnnnnnnnnnnnnnnnnnnnnnnnnnnnnnnnnnnnnnnnnnnnnnnnnnnnnnnnnnnnnnnnnnnnnnnnnnnnnnnnnnnnnnnnnnnnnnnnnnnnnnnnnnnnnnnnnnnnnnnnnnnnnnnnnnnnnnnnnnnnnnnnnnnnnnnnnnnnnnnnnnnnnnnnnnnnnnnnnnnnnnnnnnnnnnnnnnnnnnnnnnnnnnnnnnnnnnnnnnnnnnnnnnnnnnnnnnnnnnnnnnnnnnnnnnnnnnnnnnnnnnnnnnnnnnnnnnnnnnnnnnnnnnnnnnnnnnnnnnnnnnnnnnnnnnnnnnnnnnnnnnnnnnnnnnnnnnnnnnnnnnnnnnnnnnnnnnnnnnnnnnnnnnnnnnnnnnnnnnnnnnnnnnnnnnnnnnnnnnnnnnnnnnnnnnnnnnnnnnnnnnnnnnnnnnnnnnnnnnnnnnnnnnnnnnnnnnnnnnnnnnnnnnnnnnnnnnnnnnnnnnnnnnnnnnnnnnnnnnnnnnnnnnnnnnnnnnnnnnnnnnnnnnnnnnnnnnnnnnnnnnnnnnnnnnnnnnnnnnnnnnnnnnnnnnnnnnnnnnnnnnnnnnnnnnnnnnnnnnnnnnnnnnnnnnnnnnnnnnnnnnnnnnnnnnnnnnnnnnnnnnnnnnnnnnnnnnnnnnnnnnnnnnnnnnnnnnnnnnnnnnnnnnnnnnnnnnnnnnnnnnnnnnnnnnnnnnnnnnnnnnnnnnnnnnnnnnnnnnnnnnnnnnnnnnnnnnnnnnnnnnnnnnnnnnnnnnnnnnnnnnnnnnnnnnnnnnnnnnnnnnnnnnnnnnnnnnnnnnnnnnnnnnnnnnnnnnnnnnnnnnnnnnnnnnnnnnnnnnnnnnnnnnnnnnnnnnnnnnnnnnnnnnnnnnnnnnnnnnnnnnnnnnnnnnnnnnnnnnnnnnnnnnnnnnnnnnnnnnnnnnnnnnnnnnnnnnnnnnnnnnnnnnnnnnnnnnnnnnnnnnnnnnnnnnnnnnnnnnnnnnnnnnnnnnnnnnnnnnnnnnnnnnnnnnnnnnnnnnnnnnnnnnnnnnnnnnnnnnnnnnnnnnnnnnnnnnnnnnnnnnnnnnnnnnnnnnnnnnnnnnnnnnnnnnnnnnnnnnnnnnnnnnnnnnnnnnnnnnnnnnnnnnnnnnnnnnnnnnnnnnnnnnnnnnnnnnnnnnnnnnnnnnnnnnnnnnnnnnnnnnnnnnnnnnnnnnnnnnnnnnnnnnnnnnnnnnnnnnnnnnnnnnnnnnnnnnnnnnnnnnnnnnnnnnnnnnnnnnnnnnnnnnnnnnnnnnnnnnnnnnnnnnnnnnnnnnnnnnnnnnnnnnnnnnnnnnnnnnnnnnnnnnnnnnnnnnnnnnnnnnnnnnnnnnnnnnnnnnnnnnnnnnnnnnnnnnnnnnnnnnnnnnnnnnnnnnnnnnnnnnnnnnnnnnnnnnnnnnnnnnnnnnnnnnnnnnnnnnnnnnnnnnnnnnnnnnnnnnnnnnnnnnnnnnnnnnnnnnnnnnnnnnnnnnnnnnnnnnnnnnnnnnnnnnnnnnnnnnnnnnnnnnnnnnnnnnnnnnnnnnnnnnnnnnnnnnnnnnnnnnnnnnnnnnnnnnnnnnnnnnnnnnnnnnnnnnnnnnnnnnnnnnnnnnnnnnnnnnnnnnnnnnnnnnnnnnnnnnnnnnnnnnnnnnnnnnnnnnnnnnnnnnnnnnnnnnnnnnnnnnnnnnnnnnnnnnnnnnnnnnnnnnnnnnnnnnnnnnnnnnnnnnnnnnnnnnnnnnnnnnnnnnnnnnnnnnnnnnnnnnnnnnnnnnnnnnnnnnnnnnnnnnnnnnnnnnnnnnnnnnnnnnnnnnnnnnnnnnnnnnnnnnnnnnnnnnnnnnnnnnnnnnnnnnnnnnnnnnnnnnnnnnnnnnnnnnnnnnnnnnnnnnnnnnnnnnnnnnnnnnnnnnnnnnnnnnnnnnnnnnnnnnnnnnnnnnnnnnnnnnnnnnnnnnnnnnnnnnnnnnnnnnnnnnnnnnnnnnnnnnnnnnnnnnnnnnnnnnnnnnnnnnnnnnnnnnnnnnnnnnnnnnnnnnnnnnnnnnnnnnnnnnnnnnnnnnnnnnnnnnnnnnnnnnnnnnnnnnnnnnnnnnnnnnnnnnnnnnnnnnnnnnnnnnnnnnnnnnnnnnnnnnnnnnnnnnnnnnnnnnnnnnnnnnnnnnnnnnnnnnnnnnnnnnnnnnnnnnnnnnnnnnnnnnnnnnnnnnnnnnnnnnnnnnnnnnnnnnnnnnnnnnnnnnnnnnnnnnnnnnnnnnnnnnnnnnnnnnnnnnnnnnnnnnnnnnnnnnnnnnnnnnnnnnnnnnnnnnnnnnnnnnnnnnnnnnnnnnnnnnnnnnnnnnnnnnnnnnnnnnnnnnnnnnnnnnnnnnnnnnnnnnnnnnnnnnnnnnnnnnnnnnnnnnnnnnnnnnnnnnnnnnnnnnnnnnnnnnnnnnnnnnnnnnnnnnnnnnnnnnnnnnnnnnnnnnnnnnnnnnnnnnnnnnnnnnnnnnnnnnnnnnnnnnnnnnnnnnnnnnnnnnnnnnnnnnnnnnnnnnnnnnnnnnnnnnnnnnnnnnnnnnnnnnnnnnnnnnnnnnnnnnnnnnnnnnnnnnnnnnnnnnnnnnnnnnnnnnnnnnnnnnnnnnnnnnnnnnnnnnnnnnnnnnnnnnnnnnnnnnnnnnnnnnnnnnnnnnnnnnnnnnnnnnnnnnnnnnnnnnnnnnnnnnnnnnnnnnnnnnnnnnnnnnnnnnnnnnnnnnnnnnnnnnnnnnnnnnnnnnnnnnnnnnnnnnnnnnnnnnnnnnnnnnnnnnnnnnnnnnnnnnnnnnnnnnnnnnnnnnnnnnnnnnnnnnnnnnnnnnnnnnnnnnnnnnnnnnnnnnnnnnnnnnnnnnnnnnnnnnnnnnnnnnnnnnnnnnnnnnnnnnnnnnnnnnnnnnnnnnnnnnnnnnnnnnnnnnnnnnnnnnnnnnnnnnnnnnnnnnnnnnnnnnnnnnnnnnnnnnnnnnnnnnnnnnnnnnnnnnnnnnnnnnnnnnnnnnnnnnnnnnnnnnnnnnnnnnnnnnnnnnnnnnnnnnnnnnnnnnnnnnnnnnnnnnnnnnnnnnnnnnnnnnnnnnnnnnnnnnnnnnnnnnnnnnnnnnnnnnnnnnnnnnnnnnnnnnnnnnnnnnnnnnnnnnnnnnnnnnnnnnnnnnnnnnnnnnnnnnnnnnnnnnnnnnnnnnnnnnnnnnnnnnnnnnnnnnnnnnnnnnnnnnnnnnnnnnnnnnnnnnnnnnnnnnnnnnnnnnnnnnnnnnnnnnnnnnnnnnnnnnnnnnnnnnnnnnnnnnnnnnnnnnnnnnnnnnnnnnnnnnnnnnnnnnnnnnnnnnnnnnnnnnnnnnnnnnnnnnnnnnnnnnnnnnnnnnnnnnnnnnnnnnnnnnnnnnnnnnnnnnnnnnnnnnnnnnnnnnnnnnnnnnnnnnnnnnnnnnnnnnnnnnnnnnnnnnnnnnnnnnnnnnnnnnnnnnnnnnnnnnnnnnnnnnnnnnnnnnnnnnnnnnnnnnnnnnnnnnnnnnnnnnnnnnnnnnnnnnnnnnnnnnnnnnnnnnnnnnnnnnnnnnnnnnnnnnnnnnnnnnnnnnnnnnnnnnnnnnnnnnnnnnnnnnnnnnnnnnnnnnnnnnnnnnnnnnnnnnnnnnnnnnnnnnnnnnnnnnnnnnnnnnnnnnnnnnnnnnnnnnnnnnnnnnnnnnnnnnnnnnnnnnnnnnnnnnnnnnnnnnnnnnnnnnnnnnnnnnnnnnnnnnnnnnnnnnnnnnnnnnnnnnnnnnnnnnnnnnnnnnnnnnnnnnnnnnnnnnnnnnnnnnnnnnnnnnnnnnnnnnnnnnnnnnnnnnnnnnnnnnnnnnnnnnnnnnnnnnnnnnnnnnnnnnnnnnnnnnnnnnnnnnnnnnnnnnnnnnnnnnnnnnnnnnnnnnnnnnnnnnnnnnnnnnnnnnnnnnnnnnnnnnnnnnnnnnnnnnnnnnnnnnnnnnnnnnnnnnnnnnnnnnnnnnnnnnnnnnnnnnnnnnnnnnnnnnnnnnnnnnnnnnnnnnnnnnnnnnnnnnnnnnnnnnnnnnnnnnnnnnnnnnnnnnnnnnnnnnnnnnnnnnnnnnnnnnnnnnnnnnnnnnnnnnnnnnnnnnnnnnnnnnnnnnnnnnnnnnnnnnnnnnnnnnnnnnnnnnnnnnnnnnnnnnnnnnnnnnnnnnnnnnnnnnnnnnnnnnnnnnnnnnnnnnnnnnnnnnnnnnnnnnnnnnnnnnnnnnnnnnnnnnnnnnnnnnnnnnnnnnnnnnnnnnnnnnnnnnnnnnnnnnnnnnnnnnnnnnnnnnnnnnnnnnnnnnnnnnnnnnnnnnnnnnnnnnnnnnnnnnnnnnnnnnnnnnnnnnnnnnnnnnnnnnnnnnnnnnnnnnnnnnnnnnnnnnnnnnnnnnnnnnnnnnnnnnnnnnnnnnnnnnnnnnnnnnnnnnnnnnnnnnnnnnnnnnnnnnnnnnnnnnnnnnnnnnnnnnnnnnnnnnnnnnnnnnnnnnnnnnnnnnnnnnnnnnnnnnnnnnnnnnnnnnnnnnnnnnnnnnnnnnnnnnnnnnnnnnnnnnnnnnnnnnnnnnnnnnnnnnnnnnnnnnnnnnnnnnnnnnnnnnnnnnnnnnnnnnnnnnnnnnnnnnnnnnnnnnnnnnnnnnnnnnnnnnnnnnnnnnnnnnnnnnnnnnnnnnnnnnnnnnnnnnnnnnnnnnnnnnnnnnnnnnnnnnnnnnnnnnnnnnnnnnnnnnnnnnnnnnnnnnnnnnnnnnnnnnnnnnnnnnnnnnnnnnnnnnnnnnnnnnnnnnnnnnnnnnnnnnnnnnnnnnnnnnnnnnnnnnnnnnnnnnnnnnnnnnnnnnnnnnnnnnnnnnnnnnnnnnnnnnnnnnnnnnnnnnnnnnnnnnnnnnnnnnnnnnnnnnnnnnnnnnnnnnnnnnnnnnnnnnnnnnnnnnnnnnnnnnnnnnnnnnnnnnnnnnnnnnnnnnnnnnnnnnnnnnnnnnnnnnnnnnnnnnnnnnnnnnnnnnnnnnnnnnnnnnnnnnnnnnnnnnnnnnnnnnnnnnnnnnnnnnnnnnnnnnnnnnnnnnnnnnnnnnnnnnnnnnnnnnnnnnnnnnnnnnnnnnnnnnnnnnnnnnnnnnnnnnnnnnnnnnnnnnnnnnnnnnnnnnnnnnnnnnnnnnnnnnnnnnnnnnnnnnnnnnnnnnnnnnnnnnnnnnnnnnnnnnnnnnnnnnnnnnnnnnnnnnnnnnnnnnnnnnnnnnnnnnnnnnnnnnnnnnnnnnnnnnnnnnnnnnnnnnnnnnnnnnnnnnnnnnnnnnnnnnnnnnnnnnnnnnnnnnnnnnnnnnnnnnnnnnnnnnnnnnnnnnnnnnnnnnnnnnnnnnnnnnnnnnnnnnnnnnnnnnnnnnnnnnnnnnnnnnnnnnnnnnnnnnnnnnnnnnnnnnnnnnnnnnnnnnnnnnnnnnnnnnnnnnnnnnnnnnnnnnnnnnnnnnnnnnnnnnnnnnnnnnnnnnnnnnnnnnnnnnnnnnnnnnnnnnnnnnnnnnnnnnnnnnnnnnnnnnnnnnnnnnnnnnnnnnnnnnnnnnnnnnnnnnnnnnnnnnnnnnnnnnnnnnnnnnnnnnnnnnnnnnnnnnnnnnnnnnnnnnnnnnnnnnnnnnnnnnnnnnnnnnnnnnnnnnnnnnnnnnnnnnnnnnnnnnnnnnnnnnnnnnnnnnnnnnnnnnnnnnnnnnnnnnnnnnnnnnnnnnnnnnnnnnnnnnnnnnnnnnnnnnnnnnnnnnnnnnnnnnnnnnnnnnnnnnnnnnnnnnnnnnnnnnnnnnnnnnnnnnnnnnnnnnnnnnnnnnnnnnnnnnnnnnnnnnnnnnnnnnnnnnnnnnnnnnnnnnnnnnnnnnnnnnnnnnnnnnnnnnnnnnnnnnnnnnnnnnnnnnnnnnnnnnnnnnnnnnnnnnnnnnnnnnnnnnnnnnnnnnnnnnnnnnnnnnnnnnnnnnnnnnnnnnnnnnnnnnnnnnnnnnnnnnnnnnnnnnnnnnnnnnnnnnnnnnnnnnnnnnnnnnnnnnnnnnnnnnnnnnnnnnnnnnnnnnnnnnnnnnnnnnnnnnnnnnnnnnnnnnnnnnnnnnnnnnnnnnnnnnnnnnnnnnnnnnnnnnnnnnnnnnnnnnnnnnnnnnnnnnnnnnnnnnnnnnnnnnnnnnnnnnnnnnnnnnnnnnnnnnnnnnnnnnnnnnnnnnnnnnnnnnnnnnnnnnnnnnnnnnnnnnnnnnnnnnnnnnnnnnnnnnnnnnnnnnnnnnnnnnnnnnnnnnnnnnnnnnnnnnnnnnnnnnnnnnnnnnnnnnnnnnnnnnnnnnnnnnnnnnnnnnnnnnnnnnnnnnnnnnnnnnnnnnnnnnnnnnnnnnnnnnnnnnnnnnnnnnnnnnnnnnnnnnnnnnnnnnnnnnnnnnnnnnnnnnnnnnnnnnnnnnnnnnnnnnnnnnnnnnnnnnnnnnnnnnnnnnnnnnnnnnnnnnnnnnnnnnnnnnnnnnnnnnnnnnnnnnnnnnnnnnnnnnnnnnnnnnnnnnnnnnnnnnnnnnnnnnnnnnnnnnnnnnnnnnnnnnnnnnnnnnnnnnnnnnnnnnnnnnnnnnnnnnnnnnnnnnnnnnnnnnnnnnnnnnnnnnnnnnnnnnnnnnnnnnnnnnnnnnnnnnnnnnnnnnnnnnnnnnnnnnnnnnnnnnnnnnnnnnnnnnnnnnnnnnnnnnnnnnnnnnnnnnnnnnnnnnnnnnnnnnnnnnnnnnnnnnnnnnnnnnnnnnnnnnnnnnnnnnnnnnnnnnnnnnnnnnnnnnnnnnnnnnnnnnnnnnnnnnnnnnnnnnnnnnnnnnnnnnnnnnnnnnnnnnnnnnnnnnnnnnnnnnnnnnnnnnnnnnnnnnnnnnnnnnnnnnnnnnnnnnnnnnnnnnnnnnnnnnnnnnnnnnnnnnnnnnnnnnnnnnnnnnnnnnnnnnnnnnnnnnnnnnnnnnnnnnnnnnnnnnnnnnnnnnnnnnnnnnnnnnnnnnnnnnnnnnnnnnnnnnnnnnnnnnnnnnnnnnnnnnnnnnnnnnnnnnnnnnnnnnnnnnnnnnnnnnnnnnnnnnnnnnnnnnnnnnnnnnnnnnnnnnnnnnnnnnnnnnnnnnnnnnnnnnnnnnnnnnnnnnnnnnnnnnnnnnnnnnnnnnnnnnnnnnnnnnnnnnnnnnnnnnnnnnnnnnnnnnnnnnnnnnnnnnnnnnnnnnnnnnnnnnnnnnnnnnnnnnnnnnnnnnnnnnnnnnnnnnnnnnnnnnnnnnnnnnnnnnnnnnnnnnnnnnnnnnnnnnnnnnnnnnnnnnnnnnnnnnnnnnnnnnnnnnnnnnnnnnnnnnnnnnnnnnnnnnnnnnnnnnnnnnnnnnnnnnnnnnnnnnnnnnnnnnnnnnnnnnnnnnnnnnnnnnnnnnnnnnnnnnnnnnnnnnnnnnnnnnnnnnnnnnnnnnnnnnnnnnnnnnnnnnnnnnnnnnnnnnnnnnnnnnnnnnnnnnnnnnnnnnnnnnnnnnnnnnnnnnnnnnnnnnnnnnnnnnnnnnnnnnnnnnnnnnnnnnnnnnnnnnnnnnnnnnnnnnnnnnnnnnnnnnnnnnnnnnnnnnnnnnnnnnnnnnnnnnnnnnnnnnnnnnnnnnnnnnnnnnnnnnnnnnnnnnnnnnnnnnnnnnnnnnnnnnnnnnnnnnnnnnnnnnnnnnnnnnnnnnnnnnnnnnnnnnnnnnnnnnnnnnnnnnnnnnnnnnnnnnnnnnnnnnnnnnnnnnnnnnnnnnnnnnnnnnnnnnnnnnnnnnnnnnnnnnnnnnnnnnnnnnnnnnnnnnnnnnnnnnnnnnnnnnnnnnnnnnnnnnnnnnnnnnnnnnnnnnnnnnnnnnnnnnnnnnnnnnnnnnnnnnnnnnnnnnnnnnnnnnnnnnnnnnnnnnnnnnnnnnnnnnnnnnnnnnnnnnnnnnnnnnnnnnnnnnnnnnnnnnnnnnnnnnnnnnnnnnnnnnnnnnnnnnnnnnnnnnnnnnnnnnnnnnnnnnnnnnnnnnnnnnnnnnnnnnnnnnnnnnnnnnnnnnnnnnnnnnnnnnnnnnnnnnnnnnnnnnnnnnnnnnnnnnnnnnnnnnnnnnnnnnnnnnnnnnnnnnnnnnnnnnnnnnnnnnnnnnnnnnnnnnnnnnnnnnnnnnnnnnnnnnnnnnnnnnnnnnnnnnnnnnnnnnnnnnnnnnnnnnnnnnnnnnnnnnnnnnnnnnnnnnnnnnnnnnnnnnnnnnnnnnnnnnnnnnnnnnnnnnnnnnnnnnnnnnnnnnnnnnnnnnnnnnnnnnnnnnnnnnnnnnnnnnnnnnnnnnnnnnnnnnnnnnnnnnnnnnnnnnnnnnnnnnnnnnnnnnnnnnnnnnnnnnnnnnnnnnnnnnnnnnnnnnnnnnnnnnnnnnnnnnnnnnnnnnnnnnnnnnnnnnnnnnnnnnnnnnnnnnnnnnnnnnnnnnnnnnnnnnnnnnnnnnnnnnnnnnnnnnnnnnnnnnnnnnnnnnnnnnnnnnnnnnnnnnnnnnnnnnnnnnnnnnnnnnnnnnnnnnnnnnnnnnnnnnnnnnnnnnnnnnnnnnnnnnnnnnnnnnnnnnnnnnnnnnnnnnnnnnnnnnnnnnnnnnnnnnnnnnnnnnnnnnnnnnnnnnnnnnnnnnnnnnnnnnnnnnnnnnnnnnnnnnnnnnnnnnnnnnnnnnnnnnnnnnnnnnnnnnnnnnnnnnnnnnnnnnnnnnnnnnnnnnnnnnnnnnnnnnnnnnnnnnnnnnnnnnnnnnnnnnnnnnnnnnnnnnnnnnnnnnnnnnnnnnnnnnnnnnnnnnnnnnnnnnnnnnnnnnnnnnnnnnnnnnnnnnnnnnnnnnnnnnnnnnnnnnnnnnnnnnnnnnnnnnnnnnnnnnnnnnnnnnnnnnnnnnnnnnnnnnnnnnnnnnnnnnnnnnnnnnnnnnnnnnnnnnnnnnnnnnnnnnnnnnnnnnnnnnnnnnnnnnnnnnnnnnnnnnnnnnnnnnnnnnnnnnnnnnnnnnnnnnnnnnnnnnnnnnnnnnnnnnnnnnnnnnnnnnnnnnnnnnnnnnnnnnnnnnnnnnnnnnnnnnnnnnnnnnnnnnnnnnnnnnnnnnnnnnnnnnnnnnnnnnnnnnnnnnnnnnnnnnnnnnnnnnnnnnnnnnnnnnnnnnnnnnnnnnnnnnnnnnnnnnnnnnnnnnnnnnnnnnnnnnnnnnnnnnnnnnnnnnnnnnnnnnnnnnnnnnnnnnnnnnnnnnnnnnnnnnnnnnnnnnnnnnnnnnnnnnnnnnnnnnnnnnnnnnnnnnnnnnnnnnnnnnnnnnnnnnnnnnnnnnnnnnnnnnnnnnnnnnnnnnnnnnnnnnnnnnnnnnnnnnnnnnnnnnnnnnnnnnnnnnnnnnnnnnnnnnnnnnnnnnnnnnnnnnnnnnnnnnnnnnnnnnnnnnnnnnnnnnnnnnnnnnnnnnnnnnnnnnnnnnnnnnnnnnnnnnnnnnnnnnnnnnnnnnnnnnnnnnnnnnnnnnnnnnnnnnnnnnnnnnnnnnnnnnnnnnnnnnnnnnnnnnnnnnnnnnnnnnnnnnnnnnnnnnnnnnnnnnnnnnnnnnnnnnnnnnnnnnnnnnnnnnnnnnnnnnnnnnnnnnnnnnnnnnnnnnnnnnnnnnnnnnnnnnnnnnnnnnnnnnnnnnnnnnnnnnnnnnnnnnnnnnnnnnnnnnnnnnnnnnnnnnnnnnnnnnnnnnnnnnnnnnnnnnnnnnnnnnnnnnnnnnnnnnnnnnnnnnnnnnnnnnnnnnnnnnnnnnnnnnnnnnnnnnnnnnnnnnnnnnnnnnnnnnnnnnnnnnnnnnnnnnnnnnnnnnnnnnnnnnnnnnnnnnnnnnnnnnnnnnnnnnnnnnnnnnnnnnnnnnnnnnnnnnnnnnnnnnnnnnnnnnnnnnnnnnnnnnnnnnnnnnnnnnnnnnnnnnnnnnnnnnnnnnnnnnnnnnnnnnnnnnnnnnnnnnnnnnnnnnnnnnnnnnnnnnnnnnnnnnnnnnnnnnnnnnnnnnnnnnnnnnnnnnnnnnnnnnnnnnnnnnnnnnnnnnnnnnnnnnnnnnnnnnnnnnnnnnnnnnnnnnnnnnnnnnnnnnnnnnnnnnnnnnnnnnnnnnnnnnnnnnnnnnnnnnnnnnnnnnnnnnnnnnnnnnnnnnnnnnnnnnnnnnnnnnnnnnnnnnnnnnnnnnnnnnnnnnnnnnnnnnnnnnnnnnnnnnnnnnnnnnnnnnnnnnnnnnnnnnnnnnnnnnnnnnnnnnnnnnnnnnnnnnnnnnnnnnnnnnnnnnnnnnnnnnnnnnnnnnnnnnnnnnnnnnnnnnnnnnnnnnnnnnnnnnnnnnnnnnnnnnnnnnnnnnnnnnnnnnnnnnnnnnnnnnnnnnnnnnnnnnnnnnnnnnnnnnnnnnnnnnnnnnnnnnnnnnnnnnnnnnnnnnnnnnnnnnnnnnnnnnnnnnnnnnnnnnnnnnnnnnnnnnnnnnnnnnnnnnnnnnnnnnnnnnnnnnnnnnnnnnnnnnnnnnnnnnnnnnnnnnnnnnnnnnnnnnnnnnnnnnnnnnnnnnnnnnnnnnnnnnnnnnnnnnnnnnnnnnnnnnnnnnnnnnnnnnnnnnnnnnnnnnnnnnnnnnnnnnnnnnnnnnnnnnnnnnnnnnnnnnnnnnnnnnnnnnnnnnnnnnnnnnnnnnnnnnnnnnnnnnnnnnnnnnnnnnnnnnnnnnnnnnnnnnnnnnnnnnnnnnnnnnnnnnnnnnnnnnnnnnnnnnnnnnnnnnnnnnnnnnnnnnnnnnnnnnnnnnnnnnnnnnnnnnnnnnnnnnnnnnnnnnnnnnnnnnnnnnnnnnnnnnnnnnnnnnnnnnnnnnnnnnnnnnnnnnnnnnnnnnnnnnnnnnnnnnnnnnnnnnnnnnnnnnnnnnnnnnnnnnnnnnnnnnnnnnnnnnnnnnnnnnnnnnnnnnnnnnnnnnnnnnnnnnnnnnnnnnnnnnnnnnnnnnnnnnnnnnnnnnnnnnnnnnnnnnnnnnnnnnnnnnnnnnnnnnnnnnnnnnnnnnnnnnnnnnnnnnnnnnnnnnnnnnnnnnnnnnnnnnnnnnnnnnnnnnnnnnnnnnnnnnnnnnnnnnnnnnnnnnnnnnnnnnnnnnnnnnnnnnnnnnnnnnnnnnnnnnnnnnnnnnnnnnnnnnnnnnnnnnnnnnnnnnnnnnnnnnnnnnnnnnnnnnnnnnnnnnnnnnnnnnnnnnnnnnnnnnnnnnnnnnnnnnnnnnnnnnnnnnnnnnnnnnnnnnnnnnnnnnnnnnnnnnnnnnnnnnnnnnnnnnnnnnnnnnnnnnnnnnnnnnnnnnnnnnnnnnnnnnnnnnnnnnnnnnnnnnnnnnnnnnnnnnnnnnnnnnnnnnnnnnnnnnnnnnnnnnnnnnnnnnnnnnnnnnnnnnnnnnnnnnnnnnnnnnnnnnnnnnnnnnnnnnnnnnnnnnnnnnnnnnnnnnnnnnnnnnnnnnnnnnnnnnnnnnnnnnnnnnnnnnnnnnnnnnnnnnnnnnnnnnnnnnnnnnnnnnnnnnnnnnnnnnnnnnnnnnnnnnnnnnnnnnnnnnnnnnnnnnnnnnnnnnnnnnnnnnnnnnnnnnnnnnnnnnnnnnnnnnnnnnnnnnnnnnnnnnnnnnnnnnnnnnnnnnnnnnnnnnnnnnnnnnnnnnnnnnnnnnnnnnnnnnnnnnnnnnnnnnnnnnnnnnnnnnnnnnnnnnnnnnnnnnnnnnnnnnnnnnnnnnnnnnnnnnnnnnnnnnnnnnnnnnnnnnnnnnnnnnnnnnnnnnnnnnnnnnnnnnnnnnnnnnnnnnnnnnnnnnnnnnnnnnnnnnnnnnnnnnnnnnnnnnnnnnnnnnnnnnnnnnnnnnnnnnnnnnnnnnnnnnnnnnnnnnnnnnnnnnnnnnnnnnnnnnnnnnnnnnnnnnnnnnnnnnnnnnnnnnnnnnnnnnnnnnnnnnnnnnnnnnnnnnnnnnnnnnnnnnnnnnnnnnnnnnnnnnnnnnnnnnnnnnnnnnnnnnnnnnnnnnnnnnnnnnnnnnnnnnnnnnnnnnnnnnnnnnnnnnnnnnnnnnnnnnnnnnnnnnnnnnnnnnnnnnnnnnnnnnnnnnnnnnnnnnnnnnnnnnnnnnnnnnnnnnnnnnnnnnnnnnnnnnnnnnnnnnnnnnnnnnnnnnnnnnnnnnnnnnnnnnnnnnnnnnnnnnnnnnnnnnnnnnnnnnnnnnnnnnnnnnnnnnnnnnnnnnnnnnnnnnnnnnnnnnnnnnnnnnnnnnnnnnnnnnnnnnnnnnnnnnnnnnnnnnnnnnnnnnnnnnnnnnnnnnnnnnnnnnnnnnnnnnnnnnnnnnnnnnnnnnnnnnnnnnnnnnnnnnnnnnnnnnnnnnnnnnnnnnnnnnnnnnnnnnnnnnnnnnnnnnnnnnnnnnnnnnnnnnnnnnnnnnnnnnnnnnnnnnnnnnnnnnnnnnnnnnnnnnnnnnnnnnnnnnnnnnnnnnnnnnnnnnnnnnnnnnnnnnnnnnnnnnnnnnnnnnnnnnnnnnnnnnnnnnnnnnnnnnnnnnnnnnnnnnnnnnnnnnnnnnnnnnnnnnnnnnnnnnnnnnnnnnnnnnnnnnnnnnnnnnnnnnnnnnnnnnnnnnnnnnnnnnnnnnnnnnnnnnnnnnnnnnnnnnnnnnnnnnnnnnnnnnnnnnnnnnnnnnnnnnnnnnnnnnnnnnnnnnnnnnnnnnnnnnnnnnnnnnnnnnnnnnnnnnnnnnnnnnnnnnnnnnnnnnnnnnnnnnnnnnnnnnnnnnnnnnnnnnnnnnnnnnnnnnnnnnnnnnnnnnnnnnnnnnnnnnnnnnnnnnnnnnnnnnnnnnnnnnnnnnnnnnnnnnnnnnnnnnnnnnnnnnnnnnnnnnnnnnnnnnnnnnnnnnnnnnnnnnnnnnnnnnnnnnnnnnnnnnnnnnnnnnnnnnnnnnnnnnnnnnnnnnnnnnnnnnnnnnnnnnnnnnnnnnnnnnnnnnnnnnnnnnnnnnnnnnnnnnnnnnnnnnnnnnnnnnnnnnnnnnnnnnnnnnnnnnnnnnnnnnnnnnnnnnnnnnnnnnnnnnnnnnnnnnnnnnnnnnnnnnnnnnnnnnnnnnnnnnnnnnnnnnnnnnnnnnnnnnnnnnnnnnnnnnnnnnnnnnnnnnnnnnnnnnnnnnnnnnnnnnnnnnnnnnnnnnnnnnnnnnnnnnnnnnnnnnnnnnnnnnnnnnnnnnnnnnnnnnnnnnnnnnnnnnnnnnnnnnnnnnnnnnnnnnnnnnnnnnnnnnnnnnnnnnnnnnnnnnnnnnnnnnnnnnnnnnnnnnnnnnnnnnnnnnnnnnnnnnnnnnnnnnnnnnnnnnnnnnnnnnnnnnnnnnnnnnnnnnnnnnnnnnnnnnnnnnnnnnnnnnnnnnnnnnnnnnnnnnnnnnnnnnnnnnnnnnnnnnnnnnnnnnnnnnnnnnnnnnnnnnnnnnnnnnnnnnnnnnnnnnnnnnnnnnnnnnnnnnnnnnnnnnnnnnnnnnnnnnnnnnnnnnnnnnnnnnnnnnnnnnnnnnnnnnnnnnnnnnnnnnnnnnnnnnnnnnnnnnnnnnnnnnnnnnnnnnnnnnnnnnnnnnnnnnnnnnnnnnnnnnnnnnnnnnnnnnnnnnnnnnnnnnnnnnnnnnnnnnnnnnnnnnnnnnnnnnnnnnnnnnnnnnnnnnnnnnnnnnnnnnnnnnnnnnnnnnnnnnnnnnnnnnnnnnnnnnnnnnnnnnnnnnnnnnnnnnnnnnnnnnnnnnnnnnnnnnnnnnnnnnnnnnnnnnnnnnnnnnnnnnnnnnnnnnnnnnnnnnnnnnnnnnnnnnnnnnnnnnnnnnnnnnnnnnnnnnnnnnnnnnnnnnnnnnnnnnnnnnnnnnnnnnnnnnnnnnnnnnnnnnnnnnnnnnnnnnnnnnnnnnnnnnnnnnnnnnnnnnnnnnnnnnnnnnnnnnnnnnnnnnnnnnnnnnnnnnnnnnnnnnnnnnnnnnnnnnnnnnnnnnnnnnnnnnnnnnnnnnnnnnnnnnnnnnnnnnnnnnnnnnnnnnnnnnnnnnnnnnnnnnnnnnnnnnnnnnnnnnnnnnnnnnnnnnnnnnnnnnnnnnnnnnnnnnnnnnnnnnnnnnnnnnnnnnnnnnnnnnnnnnnnnnnnnnnnnnnnnnnnnnnnnnnnnnnnnnnnnnnnnnnnnnnnnnnnnnnnnnnnnnnnnnnnnnnnnnnnnnnnnnnnnnnnnnnnnnnnnnnnnnnnnnnnnnnnnnnnnnnnnnnnnnnnnnnnnnnnnnnnnnnnnnnnnnnnnnnnnnnnnnnnnnnnnnnnnnnnnnnnnnnnnnnnnnnnnnnnnnnnnnnnnnnnnnnnnnnnnnnnnnnnnnnnnnnnnnnnnnnnnnnnnnnnnnnnnnnnnnnnnnnnnnnnnnnnnnnnnnnnnnnnnnnnnnnnnnnnnnnnnnnnnnnnnnnnnnnnnnnnnnnnnnnnnnnnnnnnnnnnnnnnnnnnnnnnnnnnnnnnnnnnnnnnnnnnnnnnnnnnnnnnnnnnnnnnnnnnnnnnnnnnnnnnnnnnnnnnnnnnnnnnnnnnnnnnnnnnnnnnnnnnnnnnnnnnnnnnnnnnnnnnnnnnnnnnnnnnnnnnnnnnnnnnnnnnnnnnnnnnnnnnnnnnnnnnnnnnnnnnnnnnnnnnnnnnnnnnnnnnnnnnnnnnnnnnnnnnnnnnnnnnnnnnnnnnnnnnnnnnnnnnnnnnnnnnnnnnnnnnnnnnnnnnnnnnnnnnnnnnnnnnnnnnnnnnnnnnnnnnnnnnnnnnnnnnnnnnnnnnnnnnnnnnnnnnnnnnnnnnnnnnnnnnnnnnnnnnnnnnnnnnnnnnnnnnnnnnnnnnnnnnnnnnnnnnnnnnnnnnnnnnnnnnnnnnnnnnnnnnnnnnnnnnnnnnnnnnnnnnnnnnnnnnnnnnnnnnnnnnnnnnnnnnnnnnnnnnnnnnnnnnnnnnnnnnnnnnnnnnnnnnnnnnnnnnnnnnnnnnnnnnnnnnnnnnnnnnnnnnnnnnnnnnnnnnnnnnnnnnnnnnnnnnnnnnnnnnnnnnnnnnnnnnnnnnnnnnnnnnnnnnnnnnnnnnnnnnnnnnnnnnnnnnnnnnnnnnnnnnnnnnnnnnnnnnnnnnnnnnnnnnnnnnnnnnnnnnnnnnnnnnnnnnnnnnnnnnnnnnnnnnnnnnnnnnnnnnnnnnnnnnnnnnnnnnnnnnnnnnnnnnnnnnnnnnnnnnnnnnnnnnnnnnnnnnnnnnnnnnnnnnnnnnnnnnnnnnnnnnnnnnnnnnnnnnnnnnnnnnnnnnnnnnnnnnnnnnnnnnnnnnnnnnnnnnnnnnnnnnnnnnnnnnnnnnnnnnnnnnnnnnnnnnnnnnnnnnnnnnnnnnnnnnnnnnnnnnnnnnnnnnnnnnnnnnnnnnnnnnnnnnnnnnnnnnnnnnnnnnnnnnnnnnnnnnnnnnnnnnnnnnnnnnnnnnnnnnnnnnnnnnnnnnnnnnnnnnnnnnnnnnnnnnnnnnnnnnnnnnnnnnnnnnnnnnnnnnnnnnnnnnnnnnnnnnnnnnnnnnnnnnnnnnnnnnnnnnnnnnnnnnnnnnnnnnnnnnnnnnnnnnnnnnnnnnnnnnnnnnnnnnnnnnnnnnnnnnnnnnnnnnnnnnnnnnnnnnnnnnnnnnnnnnnnnnnnnnnnnnnnnnnnnnnnnnnnnnnnnnnnnnnnnnnnnnnnnnnnnnnnnnnnnnnnnnnnnnnnnnnnnnnnnnnnnnnnnnnnnnnnnnnnnnnnnnnnnnnnnnnnnnnnnnnnnnnnnnnnnnnnnnnnnnnnnnnnnnnnnnnnnnnnnnnnnnnnnnnnnnnnnnnnnnnnnnnnnnnnnnnnnnnnnnnnnnnnnnnnnnnnnnnnnnnnnnnnnnnnnnnnnnnnnnnnnnnnnnnnnnnnnnnnnnnnnnnnnnnnnnnnnnnnnnnnnnnnnnnnnnnnnnnnnnnnnnnnnnnnnnnnnnnnnnnnnnnnnnnnnnnnnnnnnnnnnnnnnnnnnnnnnnnnnnnnnnnnnnnnnnnnnnnnnnnnnnnnnnnnnnnnnnnnnnnnnnnnnnnnnnnnnnnnnnnnnnnnnnnnnnnnnnnnnnnnnnnnnnnnnnnnnnnnnnnnnnnnnnnnnnnnnnnnnnnnnnnnnnnnnnnnnnnnnnnnnnnnnnnnnnnnnnnnnnnnnnnnnnnnnnnnnnnnnnnnnnnnnnnnnnnnnnnnnnnnnnnnnnnnnnnnnnnnnnnnnnnnnnnnnnnnnnnnnnnnnnnnnnnnnnnnnnnnnnnnnnnnnnnnnnnnnnnnnnnnnnnnnnnnnnnnnnnnnnnnnnnnnnnnnnnnnnnnnnnnnnnnnnnnnnnnnnnnnnnnnnnnnnnnnnnnnnnnnnnnnnnnnnnnnnnnnnnnnnnnnnnnnnnnnnnnnnnnnnnnnnnnnnnnnnnnnnnnnnnnnnnnnnnnnnnnnnnnnnnnnnnnnnnnnnnnnnnnnnnnnnnnnnnnnnnnnnnnnnnnnnnnnnnnnnnnnnnnnnnnnnnnnnnnnnnnnnnnnnnnnnnnnnnnnnnnnnnnnnnnnnnnnnnnnnnnnnnnnnnnnnnnnnnnnnnnnnnnnnnnnnnnnnnnnnnnnnnnnnnnnnnnnnnnnnnnnnnnnnnnnnnnnnnnnnnnnnnnnnnnnnnnnnnnnnnnnnnnnnnnnnnnnnnnnnnnnnnnnnnnnnnnnnnnnnnnnnnnnnnnnnnnnnnnnnnnnnnnnnnnnnnnnnnnnnnnnnnnnnnnnnnnnnnnnnnnnnnnnnnnnnnnnnnnnnnnnnnnnnnnnnnnnnnnnnnnnnnnnnnnnnnnnnnnnnnnnnnnnnnnnnnnnnnnnnnnnnnnnnnnnnnnnnnnnnnnnnnnnnnnnnnnnnnnnnnnnnnnnnnnnnnnnnnnnnnnnnnnnnnnnnnnnnnnnnnnnnnnnnnnnnnnnnnnnnnnnnnnnnnnnnnnnnnnnnnnnnnnnnnnnnnnnnnnnnnnnnnnnnnnnnnnnnnnnnnnnnnnnnnnnnnnnnnnnnnnnnnnnnnnnnnnnnnnnnnnnnnnnnnnnnnnnnnnnnnnnnnnnnnnnnnnnnnnnnnnnnnnnnnnnnnnnnnnnnnnnnnnnnnnnnnnnnnnnnnnnnnnnnnnnnnnnnnnnnnnnnnnnnnnnnnnnnnnnnnnnnnnnnnnnnnnnnnnnnnnnnnnnnnnnnnnnnnnnnnnnnnnnnnnnnnnnnnnnnnnnnnnnnnnnnnnnnnnnnnnnnnnnnnnnnnnnnnnnnnnnnnnnnnnnnnnnnnnnnnnnnnnnnnnnnnnnnnnnnnnnnnnnnnnnnnnnnnnnnnnnnnnnnnnnnnnnnnnnnnnnnnnnnnnnnnnnnnnnnnnnnnnnnnnnnnnnnnnnnnnnnnnnnnnnnnnnnnnnnnnnnnnnnnnnnnnnnnnnnnnnnnnnnnnnnnnnnnnnnnnnnnnnnnnnnnnnnnnnnnnnnnnnnnnnnnnnnnnnnnnnnnnnnnnnnnnnnnnnnnnnnnnnnnnnnnnnnnnnnnnnnnnnnnnnnnnnnnnnnnnnnnnnnnnnnnnnnnnnnnnnnnnnnnnnnnnnnnnnnnnnnnnnnnnnnnnnnnnnnnnnnnnnnnnnnnnnnnnnnnnnnnnnnnnnnnnnnnnnnnnnnnnnnnnnnnnnnnnnnnnnnnnnnnnnnnnnnnnnnnnnnnnnnnnnnnnnnnnnnnnnnnnnnnnnnnnnnnnnnnnnnnnnnnnnnnnnnnnnnnnnnnnnnnnnnnnnnnnnnnnnnnnnnnnnnnnnnnnnnnnnnnnnnnnnnnnnnnnnnnnnnnnnnnnnnnnnnnnnnnnnnnnnnnnnnnnnnnnnnnnnnnnnnnnnnnnnnnnnnnnnnnnnnnnnnnnnnnnnnnnnnnnnnnnnnnnnnnnnnnnnnnnnnnnnnnnnnnnnnnnnnnnnnnnnnnnnnnnnnnnnnnnnnnnnnnnnnnnnnnnnnnnnnnnnnnnnnnnnnnnnnnnnnnnnnnnnnnnnnnnnnnnnnnnnnnnnnnnnnnnnnnnnnnnnnnnnnnnnnnnnnnnnnnnnnnnnnnnnnnnnnnnnnnnnnnnnnnnnnnnnnnnnnnnnnnnnnnnnnnnnnnnnnnnnnnnnnnnnnnnnnnnnnnnnnnnnnnnnnnnnnnnnnnnnnnnnnnnnnnnnnnnnnnnnnnnnnnnnnnnnnnnnnnnnnnnnnnnnnnnnnnnnnnnnnnnnnnnnnnnnnnnnnnnnnnnnnnnnnnnnnnnnnnnnnnnnnnnnnnnnnnnnnnnnnnnnnnnnnnnnnnnnnnnnnnnnnnnnnnnnnnnnnnnnnnnnnnnnnnnnnnnnnnnnnnnnnnnnnnnnnnnnnnnnnnnnnnnnnnnnnnnnnnnnnnnnnnnnnnnnnnnnnnnnnnnnnnnnnnnnnnnnnnnnnnnnnnnnnnnnnnnnnnnnnnnnnnnnnnnnnnnnnnnnnnnnnnnnnnnnnnnnnnnnnnnnnnnnnnnnnnnnnnnnnnnnnnnnnnnnnnnnnnnnnnnnnnnnnnnnnnnnnnnnnnnnnnnnnnnnnnnnnnnnnnnnnnnnnnnnnnnnnnnnnnnnnnnnnnnnnnnnnnnnnnnnnnnnnnnnnnnnnnnnnnnnnnnnnnnnnnnnnnnnnnnnnnnnnnnnnnnnnnnnnnnnnnnnnnnnnnnnnnnnnnnnnnnnnnnnnnnnnnnnnnnnnnnnnnnnnnnnnnnnnnnnnnnnnnnnnnnnnnnnnnnnnnnnnnnnnnnnnnnnnnnnnnnnnnnnnnnnnnnnnnnnnnnnnnnnnnnnnnnnnnnnnnnnnnnnnnnnnnnnnnnnnnnnnnnnnnnnnnnnnnnnnnnnnnnnnnnnnnnnnnnnnnnnnnnnnnnnnnnnnnnnnnnnnnnnnnnnnnnnnnnnnnnnnnnnnnnnnnnnnnnnnnnnnnnnnnnnnnnnnnnnnnnnnnnnnnnnnnnnnnnnnnnnnnnnnnnnnnnnnnnnnnnnnnnnnnnnnnnnnnnnnnnnnnnnnnnnnnnnnnnnnnnnnnnnnnnnnnnnnnnnnnnnnnnnnnnnnnnnnnnnnnnnnnnnnnnnnnnnnnnnnnnnnnnnnnnnnnnnnnnnnnnnnnnnnnnnnnnnnnnnnnnnnnnnnnnnnnnnnnnnnnnnnnnnnnnnnnnnnnnnnnnnnnnnnnnnnnnnnnnnnnnnnnnnnnnnnnnnnnnnnnnnnnnnnnnnnnnnnnnnnnnnnnnnnnnnnnnnnnnnnnnnnnnnnnnnnnnnnnnnnnnnnnnnnnnnnnnnnnnnnnnnnnnnnnnnnnnnnnnnnnnnnnnnnnnnnnnnnnnnnnnnnnnnnnnnnnnnnnnnnnnnnnnnnnnnnnnnnnnnnnnnnnnnnnnnnnnnnnnnnnnnnnnnnnnnnnnnnnnnnnnnnnnnnnnnnnnnnnnnnnnnnnnnnnnnnnnnnnnnnnnnnnnnnnnnnnnnnnnnnnnnnnnnnnnnnnnnnnnnnnnnnnnnnnnnnnnnnnnnnnnnnnnnnnnnnnnnnnnnnnnnnnnnnnnnnnnnnnnnnnnnnnnnnnnnnnnnnnnnnnnnnnnnnnnnnnnnnnnnnnnnnnnnnnnnnnnnnnnnnnnnnnnnnnnnnnnnnnnnnnnnnnnnnnnnnnnnnnnnnnnnnnnnnnnnnnnnnnnnnnnnnnnnnnnnnnnnnnnnnnnnnnnnnnnnnnnnnnnnnnnnnnnnnnnnnnnnnnnnnnnnnnnnnnnnnnnnnnnnnnnnnnnnnnnnnnnnnnnnnnnnnnnnnnnnnnnnnnnnnnnnnnnnnnnnnnnnnnnnnnnnnnnnnnnnnnnnnnnnnnnnnnnnnnnnnnnnnnnnnnnnnnnnnnnnnnnnnnnnnnnnnnnnnnnnnnnnnnnnnnnnnnnnnnnnnnnnnnnnnnnnnnnnnnnnnnnnnnnnnnnnnnnnnnnnnnnnnnnnnnnnnnnnnnnnnnnnnnnnnnnnnnnnnnnnnnnnnnnnnnnnnnnnnnnnnnnnnnnnnnnnnnnnnnnnnnnnnnnnnnnnnnnnnnnnnnnnnnnnnnnnnnnnnnnnnnnnnnnnnnnnnnnnnnnnnnnnnnnnnnnnnnnnnnnnnnnnnnnnnnnnnnnnnnnnnnnnnnnnnnnnnnnnnnnnnnnnnnnnnnnnnnnnnnnnnnnnnnnnnnnnnnnnnnnnnnnnnnnnnnnnnnnnnnnnnnnnnnnnnnnnnnnnnnnnnnnnnnnnnnnnnnnnnnnnnnnnnnnnnnnnnnnnnnnnnnnnnnnnnnnnnnnnnnnnnnnnnnnnnnnnnnnnnnnnnnnnnnnnnnnnnnnnnnnnnnnnnnnnnnnnnnnnnnnnnnnnnnnnnnnnnnnnnnnnnnnnnnnnnnnnnnnnnnnnnnnnnnnnnnnnnnnnnnnnnnnnnnnnnnnnnnnnnnnnnnnnnnnnnnnnnnnnnnnnnnnnnnnnnnnnnnnnnnnnnnnnnnnnnnnnnnnnnnnnnnnnnnnnnnnnnnnnnnnnnnnnnnnnnnnnnnnnnnnnnnnnnnnnnnnnnnnnnnnnnnnnnnnnnnnnnnnnnnnnnnnnnnnnnnnnnnnnnnnnnnnnnnnnnnnnnnnnnnnnnnnnnnnnnnnnnnnnnnnnnnnnnnnnnnnnnnnnnnnnnnnnnnnnnnnnnnnnnnnnnnnnnnnnnnnnnnnnnnnnnnnnnnnnnnnnnnnnnnnnnnnnnnnnnnnnnnnnnnnnnnnnnnnnnnnnnnnnnnnnnnnnnnnnnnnnnnnnnnnnnnnnnnnnnnnnnnnnnnnnnnnnnnnnnnnnnnnnnnnnnnnnnnnnnnnnnnnnnnnnnnnnnnnnnnnnnnnnnnnnnnnnnnnnnnnnnnnnnnnnnnnnnnnnnnnnnnnnnnnnnnnnnnnnnnnnnnnnnnnnnnnnnnnnnnnnnnnnnnnnnnnnnnnnnnnnnnnnnnnnnnnnnnnnnnnnnnnnnnnnnnnnnnnnnnnnnnnnnnnnnnnnnnnnnnnnnnnnnnnnnnnnnnnnnnnnnnnnnnnnnnnnnnnnnnnnnnnnnnnnnnnnnnnnnnnnnnnnnnnnnnnnnnnnnnnnnnnnnnnnnnnnnnnnnnnnnnnnnnnnnnnnnnnnnnnnnnnnnnnnnnnnnnnnnnnnnnnnnnnnnnnnnnnnnnnnnnnnnnnnnnnnnnnnnnnnnnnnnnnnnnnnnnnnnnnnnnnnnnnnnnnnnnnnnnnnnnnnnnnnnnnnnnnnnnnnnnnnnnnnnnnnnnnnnnnnnnnnnnnnnnnnnnnnnnnnnnnnnnnnnnnnnnnnnnnnnnnnnnnnnnnnnnnnnnnnnnnnnnnnnnnnnnnnnnnnnnnnnnnnnnnnnnnnnnnnnnnnnnnnnnnnnnnnnnnnnnnnnnnnnnnnnnnnnnnnnnnnnnnnnnnnnnnnnnnnnnnnnnnnnnnnnnnnnnnnnnnnnnnnnnnnnnnnnnnnnnnnnnnnnnnnnnnnnnnnnnnnnnnnnnnnnnnnnnnnnnnnnnnnnnnnnnnnnnnnnnnnnnnnnnnnnnnnnnnnnnnnnnnnnnnnnnnnnnnnnnnnnnnnnnnnnnnnnnnnnnnnnnnnnnnnnnnnnnnnnnnnnnnnnnnnnnnnnnnnnnnnnnnnnnnnnnnnnnnnnnnnnnnnnnnnnnnnnnnnnnnnnnnnnnnnnnnnnnnnnnnnnnnnnnnnnnnnnnnnnnnnnnnnnnnnnnnnnnnnnnnnnnnnnnnnnnnnnnnnnnnnnnnnnnnnnnnnnnnnnnnnnnnnnnnnnnnnnnnnnnnnnnnnnnnnnnnnnnnnnnnnnnnnnnnnnnnnnnnnnnnnnnnnnnnnnnnnnnnnnnnnnnnnnnnnnnnnnnnnnnnnnnnnnnnnnnnnnnnnnnnnnnnnnnnnnnnnnnnnnnnnnnnnnnnnnnnnnnnnnnnnnnnnnnnnnnnnnnnnnnnnnnnnnnnnnnnnnnnnnnnnnnnnnnnnnnnnnnnnnnnnnnnnnnnnnnnnnnnnnnnnnnnnnnnnnnnnnnnnnnnnnnnnnnnnnnnnnnnnnnnnnnnnnnnnnnnnnnnnnnnnnnnnnnnnnnnnnnnnnnnnnnnnnnnnnnnnnnnnnnnnnnnnnnnnnnnnnnnnnnnnnnnnnnnnnnnnnnnnnnnnnnnnnnnnnnnnnnnnnnnnnnnnnnnnnnnnnnnnnnnnnnnnnnnnnnnnnnnnnnnnnnnnnnnnnnnnnnnnnnnnnnnnnnnnnnnnnnnnnnnnnnnnnnnnnnnnnnnnnnnnnnnnnnnnnnnnnnnnnnnnnnnnnnnnnnnnnnnnnnnnnnnnnnnnnnnnnnnnnnnnnnnnnnnnnnnnnnnnnnnnnnnnnnnnnnnnnnnnnnnnnnnnnnnnnnnnnnnnnnnnnnnnnnnnnnnnnnnnnnnnnnnnnnnnnnnnnnnnnnnnnnnnnnnnnnnnnnnnnnnnnnnnnnnnnnnnnnnnnnnnnnnnnnnnnnnnnnnnnnnnnnnnnnnnnnnnnnnnnnnnnnnnnnnnnnnnnnnnnnnnnnnnnnnnnnnnnnnnnnnnnnnnnnnnnnnnnnnnnnnnnnnnnnnnnnnnnnnnnnnnnnnnnnnnnnnnnnnnnnnnnnnnnnnnnnnnnnnnnnnnnnnnnnnnnnnnnnnnnnnnnnnnnnnnnnnnnnnnnnnnnnnnnnnnnnnnnnnnnnnnnnnnnnnnnnnnnnnnnnnnnnnnnnnnnnnnnnnnnnnnnnnnnnnnnnnnnnnnnnnnnnnnnnnnnnnnnnnnnnnnnnnnnnnnnnnnnnnnnnnnnnnnnnnnnnnnnnnnnnnnnnnnnnnnnnnnnnnnnnnnnnnnnnnnnnnnnnnnnnnnnnnnnnnnnnnnnnnnnnnnnnnnnnnnnnnnnnnnnnnnnnnnnnnnnnnnnnnnnnnnnnnnnnnnnnnnnnnnnnnnnnnnnnnnnnnnnnnnnnnnnnnnnnnnnnnnnnnnnnnnnnnnnnnnnnnnnnnnnnnnnnnnnnnnnnnnnnnnnnnnnnnnnnnnnnnnnnnnnnnnnnnnnnnnnnnnnnnnnnnnnnnnnnnnnnnnnnnnnnnnnnnnnnnnnnnnnnnnnnnnnnnnnnnnnnnnnnnnnnnnnnnnnnnnnnnnnnnnnnnnnnnnnnnnnnnnnnnnnnnnnnnnnnnnnnnnnnnnnnnnnnnnnnnnnnnnnnnnnnnnnnnnnnnnnnnnnnnnnnnnnnnnnnnnnnnnnnnnnnnnnnnnnnnnnnnnnnnnnnnnnnnnnnnnnnnnnnnnnnnnnnnnnnnnnnnnnnnnnnnnnnnnnnnnnnnnnnnnnnnnnnnnnnnnnnnnnnnnnnnnnnnnnnnnnnnnnnnnnnnnnnnnnnnnnnnnnnnnnnnnnnnnnnnnnnnnnnnnnnnnnnnnnnnnnnnnnnnnnnnnnnnnnnnnnnnnnnnnnnnnnnnnnnnnnnnnnnnnnnnnnnnnnnnnnnnnnnnnnnnnnnnnnnnnnnnnnnnnnnnnnnnnnnnnnnnnnnnnnnnnnnnnnnnnnnnnnnnnnnnnnnnnnnnnnnnnnnnnnnnnnnnnnnnnnnnnnnnnnnnnnnnnnnnnnnnnnnnnnnnnnnnnnnnnnnnnnnnnnnnnnnnnnnnnnnnnnnnnnnnnnnnnnnnnnnnnnnnnnnnnnnnnnnnnnnnnnnnnnnnnnnnnnnnnnnnnnnnnnnnnnnnnnnnnnnnnnnnnnnnnnnnnnnnnnnnnnnnnnnnnnnnnnnnnnnnnnnnnnnnnnnnnnnnnnnnnnnnnnnnnnnnnnnnnnnnnnnnnnnnnnnnnnnnnnnnnnnnnnnnnnnnnnnnnnnnnnnnnnnnnnnnnnnnnnnnnnnnnnnnnnnnnnnnnnnnnnnnnnnnnnnnnnnnnnnnnnnnnnnnnnnnnnnnnnnnnnnnnnnnnnnnnnnnnnnnnnnnnnnnnnnnnnnnnnnnnnnnnnnnnnnnnnnnnnnnnnnnnnnnnnnnnnnnnnnnnnnnnnnnnnnnnnnnnnnnnnnnnnnnnnnnnnnnnnnnnnnnnnnnnnnnnnnnnnnnnnnnnnnnnnnnnnnnnnnnnnnnnnnnnnnnnnnnnnnnnnnnnnnnnnnnnnnnnnnnnnnnnnnnnnnnnnnnnnnnnnnnnnnnnnnnnnnnnnnnnnnnnnnnnnnnnnnnnnnnnnnnnnnnnnnnnnnnnnnnnnnnnnnnnnnnnnnnnnnnnnnnnnnnnnnnnnnnnnnnnnnnnnnnnnnnnnnnnnnnnnnnnnnnnnnnnnnnnnnnnnnnnnnnnnnnnnnnnnnnnnnnnnnnnnnnnnnnnnnnnnnnnnnnnnnnnnnnnnnnnnnnnnnnnnnnnnnnnnnnnnnnnnnnnnnnnnnnnnnnnnnnnnnnnnnnnnnnnnnnnnnnnnnnnnnnnnnnnnnnnnnnnnnnnnnnnnnnnnnnnnnnnnnnnnnnnnnnnnnnnnnnnnnnnnnnnnnnnnnnnnnnnnnnnnnnnnnnnnnnnnnnnnnnnnnnnnnnnnnnnnnnnnnnnnnnnnnnnnnnnnnnnnnnnnnnnnnnnnnnnnnnnnnnnnnnnnnnnnnnnnnnnnnnnnnnnnnnnnnnnnnnnnnnnnnnnnnnnnnnnnnnnnnnnnnnnnnnnnnnnnnnnnnnnnnnnnnnnnnnnnnnnnnnnnnnnnnnnnnnnnnnnnnnnnnnnnnnnnnnnnnnnnnnnnnnnnnnnnnnnnnnnnnnnnnnnnnnnnnnnnnnnnnnnnnnnnnnnnnnnnnnnnnnnnnnnnnnnnnnnnnnnnnnnnnnnnnnnnnnnnnnnnnnnnnnnnnnnnnnnnnnnnnnnnnnnnnnnnnnnnnnnnnnnnnnnnnnnnnnnnnnnnnnnnnnnnnnnnnnnnnnnnnnnnnnnnnnnnnnnnnnnnnnnnnnnnnnnnnnnnnnnnnnnnnnnnnnnnnnnnnnnnnnnnnnnnnnnnnnnnnnnnnnnnnnnnnnnnnnnnnnnnnnnnnnnnnnnnnnnnnnnnnnnnnnnnnnnnnnnnnnnnnnnnnnnnnnnnnnnnnnnnnnnnnnnnnnnnnnnnnnnnnnnnnnnnnnnnnnnnnnnnnnnnnnnnnnnnnnnnnnnnnnnnnnnnnnnnnnnnnnnnnnnnnnnnnnnnnnnnnnnnnnnnnnnnnnnnnnnnnnnnnnnnnnnnnnnnnnnnnnnnnnnnnnnnnnnnnnnnnnnnnnnnnnnnnnnnnnnnnnnnnnnnnnnnnnnnnnnnnnnnnnnnnnnnnnnnnnnnnnnnnnnnnnnnnnnnnnnnnnnnnnnnnnnnnnnnnnnnnnnnnnnnnnnnnnnnnnnnnnnnnnnnnnnnnnnnnnnnnnnnnnnnnnnnnnnnnnnnnnnnnnnnnnnnnnnnnnnnnnnnnnnnnnnnnnnnnnnnnnnnnnnnnnnnnnnnnnnnnnnnnnnnnnnnnnnnnnnnnnnnnnnnnnnnnnnnnnnnnnnnnnnnnnnnnnnnnnnnnnnnnnnnnnnnnnnnnnnnnnnnnnnnnnnnnnnnnnnnnnnnnnnnnnnnnnnnnnnnnnnnnnnnnnnnnnnnnnnnnnnnnnnnnnnnnnnnnnnnnnnnnnnnnnnnnnnnnnnnnnnnnnnnnnnnnnnnnnnnnnnnnnnnnnnnnnnnnnnnnnnnnnnnnnnnnnnnnnnnnnnnnnnnnnnnnnnnnnnnnnnnnnnnnnnnnnnnnnnnnnnnnnnnnnnnnnnnnnnnnnnnnnnnnnnnnnnnnnnnnnnnnnnnnnnnnnnnnnnnnnnnnnnnnnnnnnnnnnnnnnnnnnnnnnnnnnnnnnnnnnnnnnnnnnnnnnnnnnnnnnnnnnnnnnnnnnnnnnnnnnnnnnnnnnnnnnnnnnnnnnnnnnnnnnnnnnnnnnnnnnnnnnnnnnnnnnnnnnnnnnnnnnnnnnnnnnnnnnnnnnnnnnnnnnnnnnnnnnnnnnnnnnnnnnnnnnnnnnnnnnnnnnnnnnnnnnnnnnnnnnnnnnnnnnnnnnnnnnnnnnnnnnnnnnnnnnnnnnnnnnnnnnnnnnnnnnnnnnnnnnnnnnnnnnnnnnnnnnnnnnnnnnnnnnnnnnnnnnnnnnnnnnnnnnnnnnnnnnnnnnnnnnnnnnnnnnnnnnnnnnnnnnnnnnnnnnnnnnnnnnnnnnnnnnnnnnnnnnnnnnnnnnnnnnnnnnnnnnnnnnnnnnnnnnnnnnnnnnnnnnnnnnnnnnnnnnnnnnnnnnnnnnnnnnnnnnnnnnnnnnnnnnnnnnnnnnnnnnnnnnnnnnnnnnnnnnnnnnnnnnnnnnnnnnnnnnnnnnnnnnnnnnnnnnnnnnnnnnnnnnnnnnnnnnnnnnnnnnnnnnnnnnnnnnnnnnnnnnnnnnnnnnnnnnnnnnnnnnnnnnnnnnnnnnnnnnnnnnnnnnnnnnnnnnnnnnnnnnnnnnnnnnnnnnnnnnnnnnnnnnnnnnnnnnnnnnnnnnnnnnnnnnnnnnnnnnnnnnnnnnnnnnnnnnnnnnnnnnnnnnnnnnnnnnnnnnnnnnnnnnnnnnnnnnnnnnnnnnnnnnnnnnnnnnnnnnnnnnnnnnnnnnnnnnnnnnnnnnnnnnnnnnnnnnnnnnnnnnnnnnnnnnnnnnnnnnnnnnnnnnnnnnnnnnnnnnnnnnnnnnnnnnnnnnnnnnnnnnnnnnnnnnnnnnnnnnnnnnnnnnnnnnnnnnnnnnnnnnnnnnnnnnnnnnnnnnnnnnnnnnnnnnnnnnnnnnnnnnnnnnnnnnnnnnnnnnnnnnnnnnnnnnnnnnnnnnnnnnnnnnnnnnnnnnnnnnnnnnnnnnnnnnnnnnnnnnnnnnnnnnnnnnnnnnnnnnnnnnnnnnnnnnnnnnnnnnnnnnnnnnnnnnnnnnnnnnnnnnnnnnnnnnnnnnnnnnnnnnnnnnnnnnnnnnnnnnnnnnnnnnnnnnnnnnnnnnnnnnnnnnnnnnnnnnnnnnnnnnnnnnnnnnnnnnnnnnnnnnnnnnnnnnnnnnnnnnnnnnnnnnnnnnnnnnnnnnnnnnnnnnnnnnnnnnnnnnnnnnnnnnnnnnnnnnnnnnnnnnnnnnnnnnnnnnnnnnnnnnnnnnnnnnnnnnnnnnnnnnnnnnnnnnnnnnnnnnnnnnnnnnnnnnnnnnnnnnnnnnnnnnnnnnnnnnnnnnnnnnnnnnnnnnnnnnnnnnnnnnnnnnnnnnnnnnnnnnnnnnnnnnnnnnnnnnnnnnnnnnnnnnnnnnnnnnnnnnnnnnnnnnnnnnnnnnnnnnnnnnnnnnnnnnnnnnnnnnnnnnnnnnnnnnnnnnnnnnnnnnnnnnnnnnnnnnnnnnnnnnnnnnnnnnnnnnnnnnnnnnnnnnnnnnnnnnnnnnnnnnnnnnnnnnnnnnnnnnnnnnnnnnnnnnnnnnnnnnnnnnnnnnnnnnnnnnnnnnnnnnnnnnnnnnnnnnnnnnnnnnnnnnnnnnnnnnnnnnnnnnnnnnnnnnnnnnnnnnnnnnnnnnnnnnnnnnnnnnnnnnnnnnnnnnnnnnnnnnnnnnnnnnnnnnnnnnnnnnnnnnnnnnnnnnnnnnnnnnnnnnnnnnnnnnnnnnnnnnnnnnnnnnnnnnnnnnnnnnnnnnnnnnnnnnnnnnnnnnnnnnnnnnnnnnnnnnnnnnnnnnnnnnnnnnnnnnnnnnnnnnnnnnnnnnnnnnnnnnnnnnnnnnnnnnnnnnnnnnnnnnnnnnnnnnnnnnnnnnnnnnnnnnnnnnnnnnnnnnnnnnnnnnnnnnnnnnnnnnnnnnnnnnnnnnnnnnnnnnnnnnnnnnnnnnnnnnnnnnnnnnnnnnnnnnnnnnnnnnnnnnnnnnnnnnnnnnnnnnnnnnnnnnnnnnnnnnnnnnnnnnnnnnnnnnnnnnnnnnnnnnnnnnnnnnnnnnnnnnnnnnnnnnnnnnnnnnnnnnnnnnnnnnnnnnnnnnnnnnnnnnnnnnnnnnnnnnnnnnnnnnnnnnnnnnnnnnnnnnnnnnnnnnnnnnnnnnnnnnnnnnnnnnnnnnnnnnnnnnnnnnnnnnnnnnnnnnnnnnnnnnnnnnnnnnnnnnnnnnnnnnnnnnnnnnnnnnnnnnnnnnnnnnnnnnnnnnnnnnnnnnnnnnnnnnnnnnnnnnnnnnnnnnnnnnnnnnnnnnnnnnnnnnnnnnnnnnnnnnnnnnnnnnnnnnnnnnnnnnnnnnnnnnnnnnnnnnnnnnnnnnnnnnnnnnnnnnnnnnnnnnnnnnnnnnnnnnnnnnnnnnnnnnnnnnnnnnnnnnnnnnnnnnnnnnnnnnnnnnnnnnnnnnnnnnnnnnnnnnnnnnnnnnnnnnnnnnnnnnnnnnnnnnnnnnnnnnnnnnnnnnnnnnnnnnnnnnnnnnnnnnnnnnnnnnnnnnnnnnnnnnnnnnnnnnnnnnnnnnnnnnnnnnnnnnnnnnnnnnnnnnnnnnnnnnnnnnnnnnnnnnnnnnnnnnnnnnnnnnnnnnnnnnnnnnnnnnnnnnnnnnnnnnnnnnnnnnnnnnnnnnnnnnnnnnnnnnnnnnnnnnnnnnnnnnnnnnnnnnnnnnnnnnnnnnnnnnnnnnnnnnnnnnnnnnnnnnnnnnnnnnnnnnnnnnnnnnnnnnnnnnnnnnnnnnnnnnnnnnnnnnnnnnnnnnnnnnnnnnnnnnnnnnnnnnnnnnnnnnnnnnnnnnnnnnnnnnnnnnnnnnnnnnnnnnnnnnnnnnnnnnnnnnnnnnnnnnnnnnnnnnnnnnnnnnnnnnnnnnnnnnnnnnnnnnnnnnnnnnnnnnnnnnnnnnnnnnnnnnnnnnnnnnnnnnnnnnnnnnnnnnnnnnnnnnnnnnnnnnnnnnnnnnnnnnnnnnnnnnnnnnnnnnnnnnnnnnnnnnnnnnnnnnnnnnnnnnnnnnnnnnnnnnnnnnnnnnnnnnnnnnnnnnnnnnnnnnnnnnnnnnnnnnnnnnnnnnnnnnnnnnnnnnnnnnnnnnnnnnnnnnnnnnnnnnnnnnnnnnnnnnnnnnnnnnnnnnnnnnnnnnnnnnnnnnnnnnnnnnnnnnnnnnnnnnnnnnnnnnnnnnnnnnnnnnnnnnnnnnnnnnnnnnnnnnnnnnnnnnnnnnnnnnnnnnnnnnnnnnnnnnnnnnnnnnnnnnnnnnnnnnnnnnnnnnnnnnnnnnnnnnnnnnnnnnnnnnnnnnnnnnnnnnnnnnnnnnnnnnnnnnnnnnnnnnnnnnnnnnnnnnnnnnnnnnnnnnnnnnnnnnnnnnnnnnnnnnnnnnnnnnnnnnnnnnnnnnnnnnnnnnnnnnnnnnnnnnnnnnnnnnnnnnnnnnnnnnnnnnnnnnnnnnnnnnnnnnnnnnnnnnnnnnnnnnnnnnnnnnnnnnnnnnnnnnnnnnnnnnnnnnnnnnnnnnnnnnnnnnnnnnnnnnnnnnnnnnnnnnnnnnnnnnnnnnnnnnnnnnnnnnnnnnnnnnnnnnnnnnnnnnnnnnnnnnnnnnnnnnnnnnnnnnnnnnnnnnnnnnnnnnnnnnnnnnnnnnnnnnnnnnnnnnnnnnnnnnnnnnnnnnnnnnnnnnnnnnnnnnnnnnnnnnnnnnnnnnnnnnnnnnnnnnnnnnnnnnnnnnnnnnnnnnnnnnnnnnnnnnnnnnnnnnnnnnnnnnnnnnnnnnnnnnnnnnnnnnnnnnnnnnnnnnnnnnnnnnnnnnnnnnnnnnnnnnnnnnnnnnnnnnnnnnnnnnnnnnnnnnnnnnnnnnnnnnnnnnnnnnnnnnnnnnnnnnnnnnnnnnnnnnnnnnnnnnnnnnnnnnnnnnnnnnnnnnnnnnnnnnnnnnnnnnnnnnnnnnnnnnnnnnnnnnnnnnnnnnnnnnnnnnnnnnnnnnnnnnnnnnnnnnnnnnnnnnnnnnnnnnnnnnnnnnnnnnnnnnnnnnnnnnnnnnnnnnnnnnnnnnnnnnnnnnnnnnnnnnnnnnnnnnnnnnnnnnnnnnnnnnnnnnnnnnnnnnnnnnnnnnnnnnnnnnnnnnnnnnnnnnnnnnnnnnnnnnnnnnnnnnnnnnnnnnnnnnnnnnnnnnnnnnnnnnnnnnnnnnnnnnnnnnnnnnnnnnnnnnnnnnnnnnnnnnnnnnnnnnnnnnnnnnnnnnnnnnnnnnnnnnnnnnnnnnnnnnnnnnnnnnnnnnnnnnnnnnnnnnnnnnnnnnnnnnnnnnnnnnnnnnnnnnnnnnnnnnnnnnnnnnnnnnnnnnnnnnnnnnnnnnnnnnnnnnnnnnnnnnnnnnnnnnnnnnnnnnnnnnnnnnnnnnnnnnnnnnnnnnnnnnnnnnnnnnnnnnnnnnnnnnnnnnnnnnnnnnnnnnnnnnnnnnnnnnnnnnnnnnnnnnnnnnnnnnnnnnnnnnnnnnnnnnnnnnnnnnnnnnnnnnnnnnnnnnnnnnnnnnnnnnnnnnnnnnnnnnnnnnnnnnnnnnnnnnnnnnnnnnnnnnnnnnnnnnnnnnnnnnnnnnnnnnnnnnnnnnnnnnnnnnnnnnnnnnnnnnnnnnnnnnnnnnnnnnnnnnnnnnnnnnnnnnnnnnnnnnnnnnnnnnnnnnnnnnnnnnnnnnnnnnnnnnnnnnnnnnnnnnnnnnnnnnnnnnnnnnnnnnnnnnnnnccaaggctattcctctgcccactttggctatcgctctgcccaatccgcctttcgctctgcccaattcgcctttcgctctgcccattgcggcaatcgctctgcccagaggggccaatcgctctctccacagcttaaaacgctccctcagaaagcccattctctctctctcaagcacattcgctctcgatttaggggtgaatcgctccaattttaggaagaggcttcgggcttcagacatccggcttcggaccttgaaaccataaagccttgcattgtaaccttggccgcttcggcaccccacgccaaccgttgacctggaggtgtggtagcatcagtcgagattgagccgctgatctctaaacccaaagcctggtttgaatcttggtgcggcatttgctagagttgttacagcccagaggcgtctggagtaggattgaagaggaaaggcgatttgagcatgaactttaacctgcttgaggaaaagtggattccggtgctttaccgcgatgggaaatgggatcgcgtcgggattcgcaaggcgctggaggatgccggccggattcggcaaatcgtcgccaccaaccccatggacagggtggcgctcctgcgctttctgttggccgtgctcatgtggtgcaaagaggacgcgaagtcttccctcgcggctttggacgagaagaacgccgacataccagagaactggctggctaagctgaaggaaaacaaggccaagttcaatctgctgggcgacggtaagagattctatcaggaagaattgttgaagggcgaggaatctcggcccatcggcgatctgctcgtcgagttccctggagcggattcggtgaatcacatgcgccacgttgtgcatgacggttcctacggattttgccccgcgtgttgcgcgatgggaatcttgcggctctcggtctgggctccggccaacaggttttatcccgcatcagtcaacccaggctctgcggcctatgcatttattgaggggaagaaccttttccagaccctttgcgcgaatcttccagaaacaaatccgcaatctgatcaggctccatggttgggcaacgagcagccgaattcacctgatgcagtagccaggcttgcctggcggccccgcaagttatggctgaatgtagcagacaacggcggtctttgtgcatactgcgggcaaaccggaacgctggtcaaaaccctatctattaagaaggggtggtccactcccgtcaccacgggccaacaattcggcaagaatgtcttatcggaattccagaaactcaacagcgattaccaggcgaaggcaacgaacaagcgcaagctggccgacaaggttgtcaagatcgctcctgtcatcctcaagtgcaggatgccagcgctttcgcaagccgattcaaacgcggtacaaggaccagaaagcgagagccctgccgcgaagattgcacgagtcttcgagcagctgtacgcggcgggcaaccagaagataatcaaggagttgaccagaaaacccacggaggaagagaagcccctgctcgatcggcaggatacgcaggtgaaaaagttctgggttgaagaccctcatcttctcaaagaagccgaggccatcaggctgcccgacctcagtgaggacgttggcctgcacacctccaagttctggcgcgatgccttgcgtctgcgcggcaccaaggtatttgccatcggcatagtcggcgacgggcagtacgtctatcacgatgctcacgatgttcttgtaccggatgcgtccgactacgttaaaaaacgagccaatctttccagcgattgcagtggaaagttgcacaacatgctcaaggaggtgactccaaactccaaactgcagcaccccgaaattgacgcatccgtaaaatgtctgacgccaaatgccgaggctcagattcgtgaccggctgagccgaagcaatgcctcgacgggcgataacgcaaccgaagacgaggcattcctgcatgaagtatatgcgccggtggtggagcaggttatcgcttccgtaacacccggctcaccgcttcgtcgccatgccgcgcggaatcacgcgcaagccctgctgaacaagaagatcaaagtgctggttgagaagccggatcatctgtcgaacgcaggtacgcctgcagccgtgcctggcaaacccaaaagtggccgcaagaaaggaggttcaaaatgaaccagaccgctgcatacatcaagaggctttccgacttgcaggaaggcgagcgctcgcggttgcgccgtctggccggacggccgctcgacgcaacgctccagggtttcgacctcttcacgggcctctggtggccattgcggaagaaaagtcccgcaaccctacgccgggagccgtcatggctcgtcgccaagcttttcggcgcgttccgcgtcccgcacatccggcccgattcaggcgcggggccctctttgcctgaagtcctgggccgctgcgaaccgtacgaagaggatggccgcaagcgcttccgaactcgattcgacgctctgctttgctcgtccctgtcgtctctggagccgcatttgcgttgggcgctgggagaggtcgcccgggtcctcgccgggcacgtgccgcatgcgcggaaagtgaagggcatcgactgggtgcaactcctcgacgatctcagattctgggaccggggtgaggagcaccgccgcggacgcgatgttcgcgacatctgggccgaaacgtatctcaacgctactgattcaaaagagaggagagcatagaaatgttgatcgaaatccacatgatccagaatcacagcccggcgaacctgaaccgggacgacctcggcgcgcccaagacctgcatcttcggcggtgttacccgggcgcgtatctccagccagtgtctcaaacgcagcatccggcgcagcaaggagttttctgccgcgttggagaaggatggaggtgtccgcacgcgcaggttagcgaatctgctggcgcgtatcgtccatgctggagacttcgacctgacgcccgaaaagttggccaagcttctccaagtaaaacccgtcgagaacgaagagatcaagaagctcgatgctattgctgcggaagccttggaactgggcggcgtgaaggcgaaaagcaggaagaagggcaaaaacgacgacggtgaggatgagagtgccgaggcgctatccaagatgcttctcttcctctctacgacgacaatcggaaagatggcgaatgacctgaagagagcatcgaaggcagaggacctcgccgagcagtttaagaaatacattgccgaaaatcccagcgtgcccgacatcgctttgaatggacgcatgactgaggtcgcaaagaacagcgttttcagcgacttgaacttcaccgtcgaagctgcgctctccgcggcacacgccatctcgactcacgcggtcgtgaacgaggtagactacttcaccgctgccgacgacgtgcccggccaggacgccggcgcggcccacgtcaacgaggccatgttcaactcggcctgcttctataaacacttcgtcattgacttcgagcagctgaagaagaacctggcggacgatgccgaactcgcctgcaagacagtgcggtccttccttgaagcagctgccaatgccaacccctccggcaaacagcacgcatgcgcggcattcaatcagcccgacggaattctggtcgaggtcaaaactaaatcggccacgcccgtcagctacgccaacgccttcgccgatccggtgccggaaaagtccgaacgcggtttgatcggcgaaagtatcgccagacttggccagtacgcccacgatctcgttgtaggttacgaaatcgaggccgaacgtttttggttttcgcccaacggctcgcgagagttgacatgtaccgtgacagaggacgagaacggagaaaagaagcagaaagaaaagcaggtccctggcgtcagcgggttcggcaagttcgatgagttcgtcaagtcgataatggacaaggtgaaggcggtggctgcggaggcggccaaatgaccgaagccaacacactattcctccgccttgaaggccccctccaggcctggggcgatacgtcaaagttcgtcatccggcggaccatggatgcgcccaccaagtcaggcgttctcggcctaatttgctgcgctcttgggctgtcacggaaagacgcgagagagcgtttaccgtgcttaaatgagctgtccatgggcgtgcgaattgaccggcctggcgtgcgctggtgggattaccacacggtaggagcgggaatcggcatgacaaccgctgggggcggtctgaaaaccggcgcccagggcacgctcatcacgcgccgggaatatctggccgatgcaagctttcttgtggcgcttcagggcgatgctgatcttattcaatgcacaaaggaagctttggaaaatccgaagtgggcggttttccttggccgcaagtcctgcccgccgtccgtcccggtgcttgcaaggccccgcgagggtgagtcgtggaagaatcccgccggccatgacggcctgaacgccgcgctgggtgccatcccctggcgtcctcggctcaagggagattcgccgccggaaaggctggactgcctgctcgattgggtgccttcgcccgagcagcccgaggcccccgacgacgcggaggtctggtatgacgtccctttgtccctcgacccgccagcgcatcgtccccgattcgtggtccgcaaaagcgttgaggttgaaatcggcaacccaacccaatgtcccacccctcctccgccccggccgcgcgccgattacaagaacaccgaatatcaaaacgctcgtaaacagcggctggattccgatcatcacctctgcgtgttctgcaagtcccccgggaacaccatgcagcacatcacctatcgccgcgccggagggaacgagagtcaggaagacttgcgctccctttgccgcctgtgccacgacgcggtgaccatgatcgagtatggcctgggcatgggtctggaccgcatcaacccggaggaaccgcgttggagagagaaaatcatcagcaagcgggctgagatcatcgagtttcgctcgctggaaacccgacgccggcgcctgcaaccggaggaggtggaatgatgtatctctccacactgctgattgacgtaggcacaaatcccgaccgcccgcggcccggccggctatggctgcgcaacctctaccacgtccaccaacgcctgtgcatggcttttccatcgcaggcgcgggagaaagatgatcctaattttctccatccgttcaaggagtgcgacttcccgttgttgcgcaacccaaacgctgtaccggcagacccgcgccacagttttctgtttcgcattgacaacagcataaaggacaatatcccgcgcactataattattgttcagtccgaggagaggccgaattgggattatgcgtttggacttaagcccggcttgattgatccgcgaacaaatcgccccatcggcaacgccgggcactttctcgccgccccgccccaggtccgggaatacaacacaaccttcgcggaaggcggagagtttcaattccgcatccgagtcaatctaagcaaaaagagcaagaagagtaaggacgggaccgatcttcgcaagcatcgagaagggacggatggtaaaggccgccagaaagatcaaagcaagcgcgtgtcgttgacctggaatgaggaaaagaaacagaagcccgaggacgtgattattccgtggtttgcgaacaagggaatggtgacgcttaaaggagaaatggaaaaaagacaagccttccagttgcactcttgcaacgtgctaaacttgggttgggtggttgctaataagccagaccgccggatgaagttccgatctgccttgatcgagggaacgctgacggtcaacgatgccccggcgtttaagcaggcgattgaaacgggtctcggttccggcaaagccttcggcttcggcttgctcagtctggggagactcggcccatgaccgacctccatgtcctgcccaagttttccgaccgctggagccatctctacctggagcacggcaagctggacaaacaggaatcttccttggccttccatacccaggaaggcacggtggccatccccattgaccagctcggctttttgatgctggggcctggcacctccatcagccatcgcgccatgcaagccctggcggaaaataactgcctggtcgcatggaccggggagcaaggagtccgcctctatgcccatagcacgggggggacccacttttcccgccggctgctgaatcaagccagactcttttgcgaccctgacacccggattctggtgatccggcgcatgtatcaaaagcggttcccggatgccctcgccgataacttgaccctggagcaaatccggggcatggaggagacccgggtgaggaagtcctatcaggaaatttcccagaaaaccggcgttccctggtcgggccgaaattatgaccaggataactgggacaactctgatcccgttaatcgggcgctctccgcggccaactcctgtctctatggcctttgccatgccgcgatcctgtccgccggatactctccggccatcggcttcattcacaccggaaaaatgttgagtttcgtttacgacattgccgatttctataaaacggacttaaccattcctctggcttttcaggtagccggagaggcgggcttcgaggtcgagcggcgagcgcgcctggcttgtcgagaccgtttttatgaatcccggctgatggagaaaatcattccggacattgcggaggtgttcaatgctggtgatgatcttggagaaatctccggcgagtttgaagggcgcgttgtcacgctggctgatcgagcccaagtcgggagttttcctggggaaccccaccgcccgggttcgggaggaaatctggaaaatggcgattagcaaatgccgggaagggtcggtgctccaaatttggaactatccgtgtccccaagggtataggtatcgtgtttatggatcagcctcccgagaaatggtggactttgaaggaatggcgctggtccgagttccgcaaaaagagggtaaagcacccgaatgatttggacctttttggctaacctgatctttgacaattgaatggattttggggtttcaaatacggatgaacgctatcccttgagcctttgctcctttccaaatacagcatcttggtattttccccacgcatgtgggggtgaaccgatgtggctggacatttttggccttcccgcgacattttccccacgcatgtgggggtgaaccggttggggagtgggtgaagggtggatattataacattttccccacgcatgtgggggtgaaccgggtcgggagcgcggagagtgctggcgaggatgattttccccacgcatgtgggggtgaaccgtcagaggctgcagcggtggcttattccatctcattttccccacgcatgtgggggtgaaccgtgtgcgatggtctgggttggtctatgcacggcattttccccacgcatgtgggggtgaaccggacaggtctcaattttgcggcgcatggattttattttccccacgcatgtgggggtgaaccgtcatcattgcaggccattttaatcttgcatgaattttccccacgcatgtgggggtgaaccgatggaacccgcgtcggcaacggctcgacccctattttccccacgcatgtgggggtgaaccgtctatcatgctccgggcgctaagggaagttgaattttccccacgcatgtgggggtgaaccgttctcacagtttcgtttaaattgttcggaataattttccccacgcatgtgggggtgaaccgtattggagcgtcggcaagcgccatttctttgcattttccccacgcatgtgggggtgaaccgccaaagtgggcgacgtgatgaccgaattggacattttccccacgcatgtgggggtgaaccgatatccatagcggactggaggattgtagggaaattttccccacgcatgtgggggtgaaccgagtaccttctcattaaatataatcatagaaacattttccccacgcatgtgggggtgaacctcatatcaggaagttctatataacagtttgaccattttccccacgcatgtgggggtgaaccgttactaagagtggttgtttacaatgttttggaattttccccacgcatg

SEQ ID NO: 1089 - DNA, 104518 bp, Artificial Sequence
  Synthetic Oligonucleotide
  misc_feature (1)..(96349): n is a, c, g, or t
nnnnnnnnnnnnnnnnnnnnnnnnnnnnnnnnnnnnnnnnnnnnnnnnnnnnnnnnnnnnnnnnnnnnnnnnnnnnnnnnnnnnnnnnnnnnnnnnnnnnnnnnnnnnnnnnnnnnnnnnnnnnnnnnnnnnnnnnnnnnnnnnnnnnnnnnnnnnnnnnnnnnnnnnnnnnnnnnnnnnnnnnnnnnnnnnnnnnnnnnnnnnnnnnnnnnnnnnnnnnnnnnnnnnnnnnnnnnnnnnnnnnnnnnnnnnnnnnnnnnnnnnnnnnnnnnnnnnnnnnnnnnnnnnnnnnnnnnnnnnnnnnnnnnnnnnnnnnnnnnnnnnnnnnnnnnnnnnnnnnnnnnnnnnnnnnnnnnnnnnnnnnnnnnnnnnnnnnnnnnnnnnnnnnnnnnnnnnnnnnnnnnnnnnnnnnnnnnnnnnnnnnnnnnnnnnnnnnnnnnnnnnnnnnnnnnnnnnnnnnnnnnnnnnnnnnnnnnnnnnnnnnnnnnnnnnnnnnnnnnnnnnnnnnnnnnnnnnnnnnnnnnnnnnnnnnnnnnnnnnnnnnnnnnnnnnnnnnnnnnnnnnnnnnnnnnnnnnnnnnnnnnnnnnnnnnnnnnnnnnnnnnnnnnnnnnnnnnnnnnnnnnnnnnnnnnnnnnnnnnnnnnnnnnnnnnnnnnnnnnnnnnnnnnnnnnnnnnnnnnnnnnnnnnnnnnnnnnnnnnnnnnnnnnnnnnnnnnnnnnnnnnnnnnnnnnnnnnnnnnnnnnnnnnnnnnnnnnnnnnnnnnnnnnnnnnnnnnnnnnnnnnnnnnnnnnnnnnnnnnnnnnnnnnnnnnnnnnnnnnnnnnnnnnnnnnnnnnnnnnnnnnnnnnnnnnnnnnnnnnnnnnnnnnnnnnnnnnnnnnnnnnnnnnnnnnnnnnnnnnnnnnnnnnnnnnnnnnnnnnnnnnnnnnnnnnnnnnnnnnnnnnnnnnnnnnnnnnnnnnnnnnnnnnnnnnnnnnnnnnnnnnnnnnnnnnnnnnnnnnnnnnnnnnnnnnnnnnnnnnnnnnnnnnnnnnnnnnnnnnnnnnnnnnnnnnnnnnnnnnnnnnnnnnnnnnnnnnnnnnnnnnnnnnnnnnnnnnnnnnnnnnnnnnnnnnnnnnnnnnnnnnnnnnnnnnnnnnnnnnnnnnnnnnnnnnnnnnnnnnnnnnnnnnnnnnnnnnnnnnnnnnnnnnnnnnnnnnnnnnnnnnnnnnnnnnnnnnnnnnnnnnnnnnnnnnnnnnnnnnnnnnnnnnnnnnnnnnnnnnnnnnnnnnnnnnnnnnnnnnnnnnnnnnnnnnnnnnnnnnnnnnnnnnnnnnnnnnnnnnnnnnnnnnnnnnnnnnnnnnnnnnnnnnnnnnnnnnnnnnnnnnnnnnnnnnnnnnnnnnnnnnnnnnnnnnnnnnnnnnnnnnnnnnnnnnnnnnnnnnnnnnnnnnnnnnnnnnnnnnnnnnnnnnnnnnnnnnnnnnnnnnnnnnnnnnnnnnnnnnnnnnnnnnnnnnnnnnnnnnnnnnnnnnnnnnnnnnnnnnnnnnnnnnnnnnnnnnnnnnnnnnnnnnnnnnnnnnnnnnnnnnnnnnnnnnnnnnnnnnnnnnnnnnnnnnnnnnnnnnnnnnnnnnnnnnnnnnnnnnnnnnnnnnnnnnnnnnnnnnnnnnnnnnnnnnnnnnnnnnnnnnnnnnnnnnnnnnnnnnnnnnnnnnnnnnnnnnnnnnnnnnnnnnnnnnnnnnnnnnnnnnnnnnnnnnnnnnnnnnnnnnnnnnnnnnnnnnnnnnnnnnnnnnnnnnnnnnnnnnnnnnnnnnnnnnnnnnnnnnnnnnnnnnnnnnnnnnnnnnnnnnnnnnnnnnnnnnnnnnnnnnnnnnnnnnnnnnnnnnnnnnnnnnnnnnnnnnnnnnnnnnnnnnnnnnnnnnnnnnnnnnnnnnnnnnnnnnnnnnnnnnnnnnnnnnnnnnnnnnnnnnnnnnnnnnnnnnnnnnnnnnnnnnnnnnnnnnnnnnnnnnnnnnnnnnnnnnnnnnnnnnnnnnnnnnnnnnnnnnnnnnnnnnnnnnnnnnnnnnnnnnnnnnnnnnnnnnnnnnnnnnnnnnnnnnnnnnnnnnnnnnnnnnnnnnnnnnnnnnnnnnnnnnnnnnnnnnnnnnnnnnnnnnnnnnnnnnnnnnnnnnnnnnnnnnnnnnnnnnnnnnnnnnnnnnnnnnnnnnnnnnnnnnnnnnnnnnnnnnnnnnnnnnnnnnnnnnnnnnnnnnnnnnnnnnnnnnnnnnnnnnnnnnnnnnnnnnnnnnnnnnnnnnnnnnnnnnnnnnnnnnnnnnnnnnnnnnnnnnnnnnnnnnnnnnnnnnnnnnnnnnnnnnnnnnnnnnnnnnnnnnnnnnnnnnnnnnnnnnnnnnnnnnnnnnnnnnnnnnnnnnnnnnnnnnnnnnnnnnnnnnnnnnnnnnnnnnnnnnnnnnnnnnnnnnnnnnnnnnnnnnnnnnnnnnnnnnnnnnnnnnnnnnnnnnnnnnnnnnnnnnnnnnnnnnnnnnnnnnnnnnnnnnnnnnnnnnnnnnnnnnnnnnnnnnnnnnnnnnnnnnnnnnnnnnnnnnnnnnnnnnnnnnnnnnnnnnnnnnnnnnnnnnnnnnnnnnnnnnnnnnnnnnnnnnnnnnnnnnnnnnnnnnnnnnnnnnnnnnnnnnnnnnnnnnnnnnnnnnnnnnnnnnnnnnnnnnnnnnnnnnnnnnnnnnnnnnnnnnnnnnnnnnnnnnnnnnnnnnnnnnnnnnnnnnnnnnnnnnnnnnnnnnnnnnnnnnnnnnnnnnnnnnnnnnnnnnnnnnnnnnnnnnnnnnnnnnnnnnnnnnnnnnnnnnnnnnnnnnnnnnnnnnnnnnnnnnnnnnnnnnnnnnnnnnnnnnnnnnnnnnnnnnnnnnnnnnnnnnnnnnnnnnnnnnnnnnnnnnnnnnnnnnnnnnnnnnnnnnnnnnnnnnnnnnnnnnnnnnnnnnnnnnnnnnnnnnnnnnnnnnnnnnnnnnnnnnnnnnnnnnnnnnnnnnnnnnnnnnnnnnnnnnnnnnnnnnnnnnnnnnnnnnnnnnnnnnnnnnnnnnnnnnnnnnnnnnnnnnnnnnnnnnnnnnnnnnnnnnnnnnnnnnnnnnnnnnnnnnnnnnnnnnnnnnnnnnnnnnnnnnnnnnnnnnnnnnnnnnnnnnnnnnnnnnnnnnnnnnnnnnnnnnnnnnnnnnnnnnnnnnnnnnnnnnnnnnnnnnnnnnnnnnnnnnnnnnnnnnnnnnnnnnnnnnnnnnnnnnnnnnnnnnnnnnnnnnnnnnnnnnnnnnnnnnnnnnnnnnnnnnnnnnnnnnnnnnnnnnnnnnnnnnnnnnnnnnnnnnnnnnnnnnnnnnnnnnnnnnnnnnnnnnnnnnnnnnnnnnnnnnnnnnnnnnnnnnnnnnnnnnnnnnnnnnnnnnnnnnnnnnnnnnnnnnnnnnnnnnnnnnnnnnnnnnnnnnnnnnnnnnnnnnnnnnnnnnnnnnnnnnnnnnnnnnnnnnnnnnnnnnnnnnnnnnnnnnnnnnnnnnnnnnnnnnnnnnnnnnnnnnnnnnnnnnnnnnnnnnnnnnnnnnnnnnnnnnnnnnnnnnnnnnnnnnnnnnnnnnnnnnnnnnnnnnnnnnnnnnnnnnnnnnnnnnnnnnnnnnnnnnnnnnnnnnnnnnnnnnnnnnnnnnnnnnnnnnnnnnnnnnnnnnnnnnnnnnnnnnnnnnnnnnnnnnnnnnnnnnnnnnnnnnnnnnnnnnnnnnnnnnnnnnnnnnnnnnnnnnnnnnnnnnnnnnnnnnnnnnnnnnnnnnnnnnnnnnnnnnnnnnnnnnnnnnnnnnnnnnnnnnnnnnnnnnnnnnnnnnnnnnnnnnnnnnnnnnnnnnnnnnnnnnnnnnnnnnnnnnnnnnnnnnnnnnnnnnnnnnnnnnnnnnnnnnnnnnnnnnnnnnnnnnnnnnnnnnnnnnnnnnnnnnnnnnnnnnnnnnnnnnnnnnnnnnnnnnnnnnnnnnnnnnnnnnnnnnnnnnnnnnnnnnnnnnnnnnnnnnnnnnnnnnnnnnnnnnnnnnnnnnnnnnnnnnnnnnnnnnnnnnnnnnnnnnnnnnnnnnnnnnnnnnnnnnnnnnnnnnnnnnnnnnnnnnnnnnnnnnnnnnnnnnnnnnnnnnnnnnnnnnnnnnnnnnnnnnnnnnnnnnnnnnnnnnnnnnnnnnnnnnnnnnnnnnnnnnnnnnnnnnnnnnnnnnnnnnnnnnnnnnnnnnnnnnnnnnnnnnnnnnnnnnnnnnnnnnnnnnnnnnnnnnnnnnnnnnnnnnnnnnnnnnnnnnnnnnnnnnnnnnnnnnnnnnnnnnnnnnnnnnnnnnnnnnnnnnnnnnnnnnnnnnnnnnnnnnnnnnnnnnnnnnnnnnnnnnnnnnnnnnnnnnnnnnnnnnnnnnnnnnnnnnnnnnnnnnnnnnnnnnnnnnnnnnnnnnnnnnnnnnnnnnnnnnnnnnnnnnnnnnnnnnnnnnnnnnnnnnnnnnnnnnnnnnnnnnnnnnnnnnnnnnnnnnnnnnnnnnnnnnnnnnnnnnnnnnnnnnnnnnnnnnnnnnnnnnnnnnnnnnnnnnnnnnnnnnnnnnnnnnnnnnnnnnnnnnnnnnnnnnnnnnnnnnnnnnnnnnnnnnnnnnnnnnnnnnnnnnnnnnnnnnnnnnnnnnnnnnnnnnnnnnnnnnnnnnnnnnnnnnnnnnnnnnnnnnnnnnnnnnnnnnnnnnnnnnnnnnnnnnnnnnnnnnnnnnnnnnnnnnnnnnnnnnnnnnnnnnnnnnnnnnnnnnnnnnnnnnnnnnnnnnnnnnnnnnnnnnnnnnnnnnnnnnnnnnnnnnnnnnnnnnnnnnnnnnnnnnnnnnnnnnnnnnnnnnnnnnnnnnnnnnnnnnnnnnnnnnnnnnnnnnnnnnnnnnnnnnnnnnnnnnnnnnnnnnnnnnnnnnnnnnnnnnnnnnnnnnnnnnnnnnnnnnnnnnnnnnnnnnnnnnnnnnnnnnnnnnnnnnnnnnnnnnnnnnnnnnnnnnnnnnnnnnnnnnnnnnnnnnnnnnnnnnnnnnnnnnnnnnnnnnnnnnnnnnnnnnnnnnnnnnnnnnnnnnnnnnnnnnnnnnnnnnnnnnnnnnnnnnnnnnnnnnnnnnnnnnnnnnnnnnnnnnnnnnnnnnnnnnnnnnnnnnnnnnnnnnnnnnnnnnnnnnnnnnnnnnnnnnnnnnnnnnnnnnnnnnnnnnnnnnnnnnnnnnnnnnnnnnnnnnnnnnnnnnnnnnnnnnnnnnnnnnnnnnnnnnnnnnnnnnnnnnnnnnnnnnnnnnnnnnnnnnnnnnnnnnnnnnnnnnnnnnnnnnnnnnnnnnnnnnnnnnnnnnnnnnnnnnnnnnnnnnnnnnnnnnnnnnnnnnnnnnnnnnnnnnnnnnnnnnnnnnnnnnnnnnnnnnnnnnnnnnnnnnnnnnnnnnnnnnnnnnnnnnnnnnnnnnnnnnnnnnnnnnnnnnnnnnnnnnnnnnnnnnnnnnnnnnnnnnnnnnnnnnnnnnnnnnnnnnnnnnnnnnnnnnnnnnnnnnnnnnnnnnnnnnnnnnnnnnnnnnnnnnnnnnnnnnnnnnnnnnnnnnnnnnnnnnnnnnnnnnnnnnnnnnnnnnnnnnnnnnnnnnnnnnnnnnnnnnnnnnnnnnnnnnnnnnnnnnnnnnnnnnnnnnnnnnnnnnnnnnnnnnnnnnnnnnnnnnnnnnnnnnnnnnnnnnnnnnnnnnnnnnnnnnnnnnnnnnnnnnnnnnnnnnnnnnnnnnnnnnnnnnnnnnnnnnnnnnnnnnnnnnnnnnnnnnnnnnnnnnnnnnnnnnnnnnnnnnnnnnnnnnnnnnnnnnnnnnnnnnnnnnnnnnnnnnnnnnnnnnnnnnnnnnnnnnnnnnnnnnnnnnnnnnnnnnnnnnnnnnnnnnnnnnnnnnnnnnnnnnnnnnnnnnnnnnnnnnnnnnnnnnnnnnnnnnnnnnnnnnnnnnnnnnnnnnnnnnnnnnnnnnnnnnnnnnnnnnnnnnnnnnnnnnnnnnnnnnnnnnnnnnnnnnnnnnnnnnnnnnnnnnnnnnnnnnnnnnnnnnnnnnnnnnnnnnnnnnnnnnnnnnnnnnnnnnnnnnnnnnnnnnnnnnnnnnnnnnnnnnnnnnnnnnnnnnnnnnnnnnnnnnnnnnnnnnnnnnnnnnnnnnnnnnnnnnnnnnnnnnnnnnnnnnnnnnnnnnnnnnnnnnnnnnnnnnnnnnnnnnnnnnnnnnnnnnnnnnnnnnnnnnnnnnnnnnnnnnnnnnnnnnnnnnnnnnnnnnnnnnnnnnnnnnnnnnnnnnnnnnnnnnnnnnnnnnnnnnnnnnnnnnnnnnnnnnnnnnnnnnnnnnnnnnnnnnnnnnnnnnnnnnnnnnnnnnnnnnnnnnnnnnnnnnnnnnnnnnnnnnnnnnnnnnnnnnnnnnnnnnnnnnnnnnnnnnnnnnnnnnnnnnnnnnnnnnnnnnnnnnnnnnnnnnnnnnnnnnnnnnnnnnnnnnnnnnnnnnnnnnnnnnnnnnnnnnnnnnnnnnnnnnnnnnnnnnnnnnnnnnnnnnnnnnnnnnnnnnnnnnnnnnnnnnnnnnnnnnnnnnnnnnnnnnnnnnnnnnnnnnnnnnnnnnnnnnnnnnnnnnnnnnnnnnnnnnnnnnnnnnnnnnnnnnnnnnnnnnnnnnnnnnnnnnnnnnnnnnnnnnnnnnnnnnnnnnnnnnnnnnnnnnnnnnnnnnnnnnnnnnnnnnnnnnnnnnnnnnnnnnnnnnnnnnnnnnnnnnnnnnnnnnnnnnnnnnnnnnnnnnnnnnnnnnnnnnnnnnnnnnnnnnnnnnnnnnnnnnnnnnnnnnnnnnnnnnnnnnnnnnnnnnnnnnnnnnnnnnnnnnnnnnnnnnnnnnnnnnnnnnnnnnnnnnnnnnnnnnnnnnnnnnnnnnnnnnnnnnnnnnnnnnnnnnnnnnnnnnnnnnnnnnnnnnnnnnnnnnnnnnnnnnnnnnnnnnnnnnnnnnnnnnnnnnnnnnnnnnnnnnnnnnnnnnnnnnnnnnnnnnnnnnnnnnnnnnnnnnnnnnnnnnnnnnnnnnnnnnnnnnnnnnnnnnnnnnnnnnnnnnnnnnnnnnnnnnnnnnnnnnnnnnnnnnnnnnnnnnnnnnnnnnnnnnnnnnnnnnnnnnnnnnnnnnnnnnnnnnnnnnnnnnnnnnnnnnnnnnnnnnnnnnnnnnnnnnnnnnnnnnnnnnnnnnnnnnnnnnnnnnnnnnnnnnnnnnnnnnnnnnnnnnnnnnnnnnnnnnnnnnnnnnnnnnnnnnnnnnnnnnnnnnnnnnnnnnnnnnnnnnnnnnnnnnnnnnnnnnnnnnnnnnnnnnnnnnnnnnnnnnnnnnnnnnnnnnnnnnnnnnnnnnnnnnnnnnnnnnnnnnnnnnnnnnnnnnnnnnnnnnnnnnnnnnnnnnnnnnnnnnnnnnnnnnnnnnnnnnnnnnnnnnnnnnnnnnnnnnnnnnnnnnnnnnnnnnnnnnnnnnnnnnnnnnnnnnnnnnnnnnnnnnnnnnnnnnnnnnnnnnnnnnnnnnnnnnnnnnnnnnnnnnnnnnnnnnnnnnnnnnnnnnnnnnnnnnnnnnnnnnnnnnnnnnnnnnnnnnnnnnnnnnnnnnnnnnnnnnnnnnnnnnnnnnnnnnnnnnnnnnnnnnnnnnnnnnnnnnnnnnnnnnnnnnnnnnnnnnnnnnnnnnnnnnnnnnnnnnnnnnnnnnnnnnnnnnnnnnnnnnnnnnnnnnnnnnnnnnnnnnnnnnnnnnnnnnnnnnnnnnnnnnnnnnnnnnnnnnnnnnnnnnnnnnnnnnnnnnnnnnnnnnnnnnnnnnnnnnnnnnnnnnnnnnnnnnnnnnnnnnnnnnnnnnnnnnnnnnnnnnnnnnnnnnnnnnnnnnnnnnnnnnnnnnnnnnnnnnnnnnnnnnnnnnnnnnnnnnnnnnnnnnnnnnnnnnnnnnnnnnnnnnnnnnnnnnnnnnnnnnnnnnnnnnnnnnnnnnnnnnnnnnnnnnnnnnnnnnnnnnnnnnnnnnnnnnnnnnnnnnnnnnnnnnnnnnnnnnnnnnnnnnnnnnnnnnnnnnnnnnnnnnnnnnnnnnnnnnnnnnnnnnnnnnnnnnnnnnnnnnnnnnnnnnnnnnnnnnnnnnnnnnnnnnnnnnnnnnnnnnnnnnnnnnnnnnnnnnnnnnnnnnnnnnnnnnnnnnnnnnnnnnnnnnnnnnnnnnnnnnnnnnnnnnnnnnnnnnnnnnnnnnnnnnnnnnnnnnnnnnnnnnnnnnnnnnnnnnnnnnnnnnnnnnnnnnnnnnnnnnnnnnnnnnnnnnnnnnnnnnnnnnnnnnnnnnnnnnnnnnnnnnnnnnnnnnnnnnnnnnnnnnnnnnnnnnnnnnnnnnnnnnnnnnnnnnnnnnnnnnnnnnnnnnnnnnnnnnnnnnnnnnnnnnnnnnnnnnnnnnnnnnnnnnnnnnnnnnnnnnnnnnnnnnnnnnnnnnnnnnnnnnnnnnnnnnnnnnnnnnnnnnnnnnnnnnnnnnnnnnnnnnnnnnnnnnnnnnnnnnnnnnnnnnnnnnnnnnnnnnnnnnnnnnnnnnnnnnnnnnnnnnnnnnnnnnnnnnnnnnnnnnnnnnnnnnnnnnnnnnnnnnnnnnnnnnnnnnnnnnnnnnnnnnnnnnnnnnnnnnnnnnnnnnnnnnnnnnnnnnnnnnnnnnnnnnnnnnnnnnnnnnnnnnnnnnnnnnnnnnnnnnnnnnnnnnnnnnnnnnnnnnnnnnnnnnnnnnnnnnnnnnnnnnnnnnnnnnnnnnnnnnnnnnnnnnnnnnnnnnnnnnnnnnnnnnnnnnnnnnnnnnnnnnnnnnnnnnnnnnnnnnnnnnnnnnnnnnnnnnnnnnnnnnnnnnnnnnnnnnnnnnnnnnnnnnnnnnnnnnnnnnnnnnnnnnnnnnnnnnnnnnnnnnnnnnnnnnnnnnnnnnnnnnnnnnnnnnnnnnnnnnnnnnnnnnnnnnnnnnnnnnnnnnnnnnnnnnnnnnnnnnnnnnnnnnnnnnnnnnnnnnnnnnnnnnnnnnnnnnnnnnnnnnnnnnnnnnnnnnnnnnnnnnnnnnnnnnnnnnnnnnnnnnnnnnnnnnnnnnnnnnnnnnnnnnnnnnnnnnnnnnnnnnnnnnnnnnnnnnnnnnnnnnnnnnnnnnnnnnnnnnnnnnnnnnnnnnnnnnnnnnnnnnnnnnnnnnnnnnnnnnnnnnnnnnnnnnnnnnnnnnnnnnnnnnnnnnnnnnnnnnnnnnnnnnnnnnnnnnnnnnnnnnnnnnnnnnnnnnnnnnnnnnnnnnnnnnnnnnnnnnnnnnnnnnnnnnnnnnnnnnnnnnnnnnnnnnnnnnnnnnnnnnnnnnnnnnnnnnnnnnnnnnnnnnnnnnnnnnnnnnnnnnnnnnnnnnnnnnnnnnnnnnnnnnnnnnnnnnnnnnnnnnnnnnnnnnnnnnnnnnnnnnnnnnnnnnnnnnnnnnnnnnnnnnnnnnnnnnnnnnnnnnnnnnnnnnnnnnnnnnnnnnnnnnnnnnnnnnnnnnnnnnnnnnnnnnnnnnnnnnnnnnnnnnnnnnnnnnnnnnnnnnnnnnnnnnnnnnnnnnnnnnnnnnnnnnnnnnnnnnnnnnnnnnnnnnnnnnnnnnnnnnnnnnnnnnnnnnnnnnnnnnnnnnnnnnnnnnnnnnnnnnnnnnnnnnnnnnnnnnnnnnnnnnnnnnnnnnnnnnnnnnnnnnnnnnnnnnnnnnnnnnnnnnnnnnnnnnnnnnnnnnnnnnnnnnnnnnnnnnnnnnnnnnnnnnnnnnnnnnnnnnnnnnnnnnnnnnnnnnnnnnnnnnnnnnnnnnnnnnnnnnnnnnnnnnnnnnnnnnnnnnnnnnnnnnnnnnnnnnnnnnnnnnnnnnnnnnnnnnnnnnnnnnnnnnnnnnnnnnnnnnnnnnnnnnnnnnnnnnnnnnnnnnnnnnnnnnnnnnnnnnnnnnnnnnnnnnnnnnnnnnnnnnnnnnnnnnnnnnnnnnnnnnnnnnnnnnnnnnnnnnnnnnnnnnnnnnnnnnnnnnnnnnnnnnnnnnnnnnnnnnnnnnnnnnnnnnnnnnnnnnnnnnnnnnnnnnnnnnnnnnnnnnnnnnnnnnnnnnnnnnnnnnnnnnnnnnnnnnnnnnnnnnnnnnnnnnnnnnnnnnnnnnnnnnnnnnnnnnnnnnnnnnnnnnnnnnnnnnnnnnnnnnnnnnnnnnnnnnnnnnnnnnnnnnnnnnnnnnnnnnnnnnnnnnnnnnnnnnnnnnnnnnnnnnnnnnnnnnnnnnnnnnnnnnnnnnnnnnnnnnnnnnnnnnnnnnnnnnnnnnnnnnnnnnnnnnnnnnnnnnnnnnnnnnnnnnnnnnnnnnnnnnnnnnnnnnnnnnnnnnnnnnnnnnnnnnnnnnnnnnnnnnnnnnnnnnnnnnnnnnnnnnnnnnnnnnnnnnnnnnnnnnnnnnnnnnnnnnnnnnnnnnnnnnnnnnnnnnnnnnnnnnnnnnnnnnnnnnnnnnnnnnnnnnnnnnnnnnnnnnnnnnnnnnnnnnnnnnnnnnnnnnnnnnnnnnnnnnnnnnnnnnnnnnnnnnnnnnnnnnnnnnnnnnnnnnnnnnnnnnnnnnnnnnnnnnnnnnnnnnnnnnnnnnnnnnnnnnnnnnnnnnnnnnnnnnnnnnnnnnnnnnnnnnnnnnnnnnnnnnnnnnnnnnnnnnnnnnnnnnnnnnnnnnnnnnnnnnnnnnnnnnnnnnnnnnnnnnnnnnnnnnnnnnnnnnnnnnnnnnnnnnnnnnnnnnnnnnnnnnnnnnnnnnnnnnnnnnnnnnnnnnnnnnnnnnnnnnnnnnnnnnnnnnnnnnnnnnnnnnnnnnnnnnnnnnnnnnnnnnnnnnnnnnnnnnnnnnnnnnnnnnnnnnnnnnnnnnnnnnnnnnnnnnnnnnnnnnnnnnnnnnnnnnnnnnnnnnnnnnnnnnnnnnnnnnnnnnnnnnnnnnnnnnnnnnnnnnnnnnnnnnnnnnnnnnnnnnnnnnnnnnnnnnnnnnnnnnnnnnnnnnnnnnnnnnnnnnnnnnnnnnnnnnnnnnnnnnnnnnnnnnnnnnnnnnnnnnnnnnnnnnnnnnnnnnnnnnnnnnnnnnnnnnnnnnnnnnnnnnnnnnnnnnnnnnnnnnnnnnnnnnnnnnnnnnnnnnnnnnnnnnnnnnnnnnnnnnnnnnnnnnnnnnnnnnnnnnnnnnnnnnnnnnnnnnnnnnnnnnnnnnnnnnnnnnnnnnnnnnnnnnnnnnnnnnnnnnnnnnnnnnnnnnnnnnnnnnnnnnnnnnnnnnnnnnnnnnnnnnnnnnnnnnnnnnnnnnnnnnnnnnnnnnnnnnnnnnnnnnnnnnnnnnnnnnnnnnnnnnnnnnnnnnnnnnnnnnnnnnnnnnnnnnnnnnnnnnnnnnnnnnnnnnnnnnnnnnnnnnnnnnnnnnnnnnnnnnnnnnnnnnnnnnnnnnnnnnnnnnnnnnnnnnnnnnnnnnnnnnnnnnnnnnnnnnnnnnnnnnnnnnnnnnnnnnnnnnnnnnnnnnnnnnnnnnnnnnnnnnnnnnnnnnnnnnnnnnnnnnnnnnnnnnnnnnnnnnnnnnnnnnnnnnnnnnnnnnnnnnnnnnnnnnnnnnnnnnnnnnnnnnnnnnnnnnnnnnnnnnnnnnnnnnnnnnnnnnnnnnnnnnnnnnnnnnnnnnnnnnnnnnnnnnnnnnnnnnnnnnnnnnnnnnnnnnnnnnnnnnnnnnnnnnnnnnnnnnnnnnnnnnnnnnnnnnnnnnnnnnnnnnnnnnnnnnnnnnnnnnnnnnnnnnnnnnnnnnnnnnnnnnnnnnnnnnnnnnnnnnnnnnnnnnnnnnnnnnnnnnnnnnnnnnnnnnnnnnnnnnnnnnnnnnnnnnnnnnnnnnnnnnnnnnnnnnnnnnnnnnnnnnnnnnnnnnnnnnnnnnnnnnnnnnnnnnnnnnnnnnnnnnnnnnnnnnnnnnnnnnnnnnnnnnnnnnnnnnnnnnnnnnnnnnnnnnnnnnnnnnnnnnnnnnnnnnnnnnnnnnnnnnnnnnnnnnnnnnnnnnnnnnnnnnnnnnnnnnnnnnnnnnnnnnnnnnnnnnnnnnnnnnnnnnnnnnnnnnnnnnnnnnnnnnnnnnnnnnnnnnnnnnnnnnnnnnnnnnnnnnnnnnnnnnnnnnnnnnnnnnnnnnnnnnnnnnnnnnnnnnnnnnnnnnnnnnnnnnnnnnnnnnnnnnnnnnnnnnnnnnnnnnnnnnnnnnnnnnnnnnnnnnnnnnnnnnnnnnnnnnnnnnnnnnnnnnnnnnnnnnnnnnnnnnnnnnnnnnnnnnnnnnnnnnnnnnnnnnnnnnnnnnnnnnnnnnnnnnnnnnnnnnnnnnnnnnnnnnnnnnnnnnnnnnnnnnnnnnnnnnnnnnnnnnnnnnnnnnnnnnnnnnnnnnnnnnnnnnnnnnnnnnnnnnnnnnnnnnnnnnnnnnnnnnnnnnnnnnnnnnnnnnnnnnnnnnnnnnnnnnnnnnnnnnnnnnnnnnnnnnnnnnnnnnnnnnnnnnnnnnnnnnnnnnnnnnnnnnnnnnnnnnnnnnnnnnnnnnnnnnnnnnnnnnnnnnnnnnnnnnnnnnnnnnnnnnnnnnnnnnnnnnnnnnnnnnnnnnnnnnnnnnnnnnnnnnnnnnnnnnnnnnnnnnnnnnnnnnnnnnnnnnnnnnnnnnnnnnnnnnnnnnnnnnnnnnnnnnnnnnnnnnnnnnnnnnnnnnnnnnnnnnnnnnnnnnnnnnnnnnnnnnnnnnnnnnnnnnnnnnnnnnnnnnnnnnnnnnnnnnnnnnnnnnnnnnnnnnnnnnnnnnnnnnnnnnnnnnnnnnnnnnnnnnnnnnnnnnnnnnnnnnnnnnnnnnnnnnnnnnnnnnnnnnnnnnnnnnnnnnnnnnnnnnnnnnnnnnnnnnnnnnnnnnnnnnnnnnnnnnnnnnnnnnnnnnnnnnnnnnnnnnnnnnnnnnnnnnnnnnnnnnnnnnnnnnnnnnnnnnnnnnnnnnnnnnnnnnnnnnnnnnnnnnnnnnnnnnnnnnnnnnnnnnnnnnnnnnnnnnnnnnnnnnnnnnnnnnnnnnnnnnnnnnnnnnnnnnnnnnnnnnnnnnnnnnnnnnnnnnnnnnnnnnnnnnnnnnnnnnnnnnnnnnnnnnnnnnnnnnnnnnnnnnnnnnnnnnnnnnnnnnnnnnnnnnnnnnnnnnnnnnnnnnnnnnnnnnnnnnnnnnnnnnnnnnnnnnnnnnnnnnnnnnnnnnnnnnnnnnnnnnnnnnnnnnnnnnnnnnnnnnnnnnnnnnnnnnnnnnnnnnnnnnnnnnnnnnnnnnnnnnnnnnnnnnnnnnnnnnnnnnnnnnnnnnnnnnnnnnnnnnnnnnnnnnnnnnnnnnnnnnnnnnnnnnnnnnnnnnnnnnnnnnnnnnnnnnnnnnnnnnnnnnnnnnnnnnnnnnnnnnnnnnnnnnnnnnnnnnnnnnnnnnnnnnnnnnnnnnnnnnnnnnnnnnnnnnnnnnnnnnnnnnnnnnnnnnnnnnnnnnnnnnnnnnnnnnnnnnnnnnnnnnnnnnnnnnnnnnnnnnnnnnnnnnnnnnnnnnnnnnnnnnnnnnnnnnnnnnnnnnnnnnnnnnnnnnnnnnnnnnnnnnnnnnnnnnnnnnnnnnnnnnnnnnnnnnnnnnnnnnnnnnnnnnnnnnnnnnnnnnnnnnnnnnnnnnnnnnnnnnnnnnnnnnnnnnnnnnnnnnnnnnnnnnnnnnnnnnnnnnnnnnnnnnnnnnnnnnnnnnnnnnnnnnnnnnnnnnnnnnnnnnnnnnnnnnnnnnnnnnnnnnnnnnnnnnnnnnnnnnnnnnnnnnnnnnnnnnnnnnnnnnnnnnnnnnnnnnnnnnnnnnnnnnnnnnnnnnnnnnnnnnnnnnnnnnnnnnnnnnnnnnnnnnnnnnnnnnnnnnnnnnnnnnnnnnnnnnnnnnnnnnnnnnnnnnnnnnnnnnnnnnnnnnnnnnnnnnnnnnnnnnnnnnnnnnnnnnnnnnnnnnnnnnnnnnnnnnnnnnnnnnnnnnnnnnnnnnnnnnnnnnnnnnnnnnnnnnnnnnnnnnnnnnnnnnnnnnnnnnnnnnnnnnnnnnnnnnnnnnnnnnnnnnnnnnnnnnnnnnnnnnnnnnnnnnnnnnnnnnnnnnnnnnnnnnnnnnnnnnnnnnnnnnnnnnnnnnnnnnnnnnnnnnnnnnnnnnnnnnnnnnnnnnnnnnnnnnnnnnnnnnnnnnnnnnnnnnnnnnnnnnnnnnnnnnnnnnnnnnnnnnnnnnnnnnnnnnnnnnnnnnnnnnnnnnnnnnnnnnnnnnnnnnnnnnnnnnnnnnnnnnnnnnnnnnnnnnnnnnnnnnnnnnnnnnnnnnnnnnnnnnnnnnnnnnnnnnnnnnnnnnnnnnnnnnnnnnnnnnnnnnnnnnnnnnnnnnnnnnnnnnnnnnnnnnnnnnnnnnnnnnnnnnnnnnnnnnnnnnnnnnnnnnnnnnnnnnnnnnnnnnnnnnnnnnnnnnnnnnnnnnnnnnnnnnnnnnnnnnnnnnnnnnnnnnnnnnnnnnnnnnnnnnnnnnnnnnnnnnnnnnnnnnnnnnnnnnnnnnnnnnnnnnnnnnnnnnnnnnnnnnnnnnnnnnnnnnnnnnnnnnnnnnnnnnnnnnnnnnnnnnnnnnnnnnnnnnnnnnnnnnnnnnnnnnnnnnnnnnnnnnnnnnnnnnnnnnnnnnnnnnnnnnnnnnnnnnnnnnnnnnnnnnnnnnnnnnnnnnnnnnnnnnnnnnnnnnnnnnnnnnnnnnnnnnnnnnnnnnnnnnnnnnnnnnnnnnnnnnnnnnnnnnnnnnnnnnnnnnnnnnnnnnnnnnnnnnnnnnnnnnnnnnnnnnnnnnnnnnnnnnnnnnnnnnnnnnnnnnnnnnnnnnnnnnnnnnnnnnnnnnnnnnnnnnnnnnnnnnnnnnnnnnnnnnnnnnnnnnnnnnnnnnnnnnnnnnnnnnnnnnnnnnnnnnnnnnnnnnnnnnnnnnnnnnnnnnnnnnnnnnnnnnnnnnnnnnnnnnnnnnnnnnnnnnnnnnnnnnnnnnnnnnnnnnnnnnnnnnnnnnnnnnnnnnnnnnnnnnnnnnnnnnnnnnnnnnnnnnnnnnnnnnnnnnnnnnnnnnnnnnnnnnnnnnnnnnnnnnnnnnnnnnnnnnnnnnnnnnnnnnnnnnnnnnnnnnnnnnnnnnnnnnnnnnnnnnnnnnnnnnnnnnnnnnnnnnnnnnnnnnnnnnnnnnnnnnnnnnnnnnnnnnnnnnnnnnnnnnnnnnnnnnnnnnnnnnnnnnnnnnnnnnnnnnnnnnnnnnnnnnnnnnnnnnnnnnnnnnnnnnnnnnnnnnnnnnnnnnnnnnnnnnnnnnnnnnnnnnnnnnnnnnnnnnnnnnnnnnnnnnnnnnnnnnnnnnnnnnnnnnnnnnnnnnnnnnnnnnnnnnnnnnnnnnnnnnnnnnnnnnnnnnnnnnnnnnnnnnnnnnnnnnnnnnnnnnnnnnnnnnnnnnnnnnnnnnnnnnnnnnnnnnnnnnnnnnnnnnnnnnnnnnnnnnnnnnnnnnnnnnnnnnnnnnnnnnnnnnnnnnnnnnnnnnnnnnnnnnnnnnnnnnnnnnnnnnnnnnnnnnnnnnnnnnnnnnnnnnnnnnnnnnnnnnnnnnnnnnnnnnnnnnnnnnnnnnnnnnnnnnnnnnnnnnnnnnnnnnnnnnnnnnnnnnnnnnnnnnnnnnnnnnnnnnnnnnnnnnnnnnnnnnnnnnnnnnnnnnnnnnnnnnnnnnnnnnnnnnnnnnnnnnnnnnnnnnnnnnnnnnnnnnnnnnnnnnnnnnnnnnnnnnnnnnnnnnnnnnnnnnnnnnnnnnnnnnnnnnnnnnnnnnnnnnnnnnnnnnnnnnnnnnnnnnnnnnnnnnnnnnnnnnnnnnnnnnnnnnnnnnnnnnnnnnnnnnnnnnnnnnnnnnnnnnnnnnnnnnnnnnnnnnnnnnnnnnnnnnnnnnnnnnnnnnnnnnnnnnnnnnnnnnnnnnnnnnnnnnnnnnnnnnnnnnnnnnnnnnnnnnnnnnnnnnnnnnnnnnnnnnnnnnnnnnnnnnnnnnnnnnnnnnnnnnnnnnnnnnnnnnnnnnnnnnnnnnnnnnnnnnnnnnnnnnnnnnnnnnnnnnnnnnnnnnnnnnnnnnnnnnnnnnnnnnnnnnnnnnnnnnnnnnnnnnnnnnnnnnnnnnnnnnnnnnnnnnnnnnnnnnnnnnnnnnnnnnnnnnnnnnnnnnnnnnnnnnnnnnnnnnnnnnnnnnnnnnnnnnnnnnnnnnnnnnnnnnnnnnnnnnnnnnnnnnnnnnnnnnnnnnnnnnnnnnnnnnnnnnnnnnnnnnnnnnnnnnnnnnnnnnnnnnnnnnnnnnnnnnnnnnnnnnnnnnnnnnnnnnnnnnnnnnnnnnnnnnnnnnnnnnnnnnnnnnnnnnnnnnnnnnnnnnnnnnnnnnnnnnnnnnnnnnnnnnnnnnnnnnnnnnnnnnnnnnnnnnnnnnnnnnnnnnnnnnnnnnnnnnnnnnnnnnnnnnnnnnnnnnnnnnnnnnnnnnnnnnnnnnnnnnnnnnnnnnnnnnnnnnnnnnnnnnnnnnnnnnnnnnnnnnnnnnnnnnnnnnnnnnnnnnnnnnnnnnnnnnnnnnnnnnnnnnnnnnnnnnnnnnnnnnnnnnnnnnnnnnnnnnnnnnnnnnnnnnnnnnnnnnnnnnnnnnnnnnnnnnnnnnnnnnnnnnnnnnnnnnnnnnnnnnnnnnnnnnnnnnnnnnnnnnnnnnnnnnnnnnnnnnnnnnnnnnnnnnnnnnnnnnnnnnnnnnnnnnnnnnnnnnnnnnnnnnnnnnnnnnnnnnnnnnnnnnnnnnnnnnnnnnnnnnnnnnnnnnnnnnnnnnnnnnnnnnnnnnnnnnnnnnnnnnnnnnnnnnnnnnnnnnnnnnnnnnnnnnnnnnnnnnnnnnnnnnnnnnnnnnnnnnnnnnnnnnnnnnnnnnnnnnnnnnnnnnnnnnnnnnnnnnnnnnnnnnnnnnnnnnnnnnnnnnnnnnnnnnnnnnnnnnnnnnnnnnnnnnnnnnnnnnnnnnnnnnnnnnnnnnnnnnnnnnnnnnnnnnnnnnnnnnnnnnnnnnnnnnnnnnnnnnnnnnnnnnnnnnnnnnnnnnnnnnnnnnnnnnnnnnnnnnnnnnnnnnnnnnnnnnnnnnnnnnnnnnnnnnnnnnnnnnnnnnnnnnnnnnnnnnnnnnnnnnnnnnnnnnnnnnnnnnnnnnnnnnnnnnnnnnnnnnnnnnnnnnnnnnnnnnnnnnnnnnnnnnnnnnnnnnnnnnnnnnnnnnnnnnnnnnnnnnnnnnnnnnnnnnnnnnnnnnnnnnnnnnnnnnnnnnnnnnnnnnnnnnnnnnnnnnnnnnnnnnnnnnnnnnnnnnnnnnnnnnnnnnnnnnnnnnnnnnnnnnnnnnnnnnnnnnnnnnnnnnnnnnnnnnnnnnnnnnnnnnnnnnnnnnnnnnnnnnnnnnnnnnnnnnnnnnnnnnnnnnnnnnnnnnnnnnnnnnnnnnnnnnnnnnnnnnnnnnnnnnnnnnnnnnnnnnnnnnnnnnnnnnnnnnnnnnnnnnnnnnnnnnnnnnnnnnnnnnnnnnnnnnnnnnnnnnnnnnnnnnnnnnnnnnnnnnnnnnnnnnnnnnnnnnnnnnnnnnnnnnnnnnnnnnnnnnnnnnnnnnnnnnnnnnnnnnnnnnnnnnnnnnnnnnnnnnnnnnnnnnnnnnnnnnnnnnnnnnnnnnnnnnnnnnnnnnnnnnnnnnnnnnnnnnnnnnnnnnnnnnnnnnnnnnnnnnnnnnnnnnnnnnnnnnnnnnnnnnnnnnnnnnnnnnnnnnnnnnnnnnnnnnnnnnnnnnnnnnnnnnnnnnnnnnnnnnnnnnnnnnnnnnnnnnnnnnnnnnnnnnnnnnnnnnnnnnnnnnnnnnnnnnnnnnnnnnnnnnnnnnnnnnnnnnnnnnnnnnnnnnnnnnnnnnnnnnnnnnnnnnnnnnnnnnnnnnnnnnnnnnnnnnnnnnnnnnnnnnnnnnnnnnnnnnnnnnnnnnnnnnnnnnnnnnnnnnnnnnnnnnnnnnnnnnnnnnnnnnnnnnnnnnnnnnnnnnnnnnnnnnnnnnnnnnnnnnnnnnnnnnnnnnnnnnnnnnnnnnnnnnnnnnnnnnnnnnnnnnnnnnnnnnnnnnnnnnnnnnnnnnnnnnnnnnnnnnnnnnnnnnnnnnnnnnnnnnnnnnnnnnnnnnnnnnnnnnnnnnnnnnnnnnnnnnnnnnnnnnnnnnnnnnnnnnnnnnnnnnnnnnnnnnnnnnnnnnnnnnnnnnnnnnnnnnnnnnnnnnnnnnnnnnnnnnnnnnnnnnnnnnnnnnnnnnnnnnnnnnnnnnnnnnnnnnnnnnnnnnnnnnnnnnnnnnnnnnnnnnnnnnnnnnnnnnnnnnnnnnnnnnnnnnnnnnnnnnnnnnnnnnnnnnnnnnnnnnnnnnnnnnnnnnnnnnnnnnnnnnnnnnnnnnnnnnnnnnnnnnnnnnnnnnnnnnnnnnnnnnnnnnnnnnnnnnnnnnnnnnnnnnnnnnnnnnnnnnnnnnnnnnnnnnnnnnnnnnnnnnnnnnnnnnnnnnnnnnnnnnnnnnnnnnnnnnnnnnnnnnnnnnnnnnnnnnnnnnnnnnnnnnnnnnnnnnnnnnnnnnnnnnnnnnnnnnnnnnnnnnnnnnnnnnnnnnnnnnnnnnnnnnnnnnnnnnnnnnnnnnnnnnnnnnnnnnnnnnnnnnnnnnnnnnnnnnnnnnnnnnnnnnnnnnnnnnnnnnnnnnnnnnnnnnnnnnnnnnnnnnnnnnnnnnnnnnnnnnnnnnnnnnnnnnnnnnnnnnnnnnnnnnnnnnnnnnnnnnnnnnnnnnnnnnnnnnnnnnnnnnnnnnnnnnnnnnnnnnnnnnnnnnnnnnnnnnnnnnnnnnnnnnnnnnnnnnnnnnnnnnnnnnnnnnnnnnnnnnnnnnnnnnnnnnnnnnnnnnnnnnnnnnnnnnnnnnnnnnnnnnnnnnnnnnnnnnnnnnnnnnnnnnnnnnnnnnnnnnnnnnnnnnnnnnnnnnnnnnnnnnnnnnnnnnnnnnnnnnnnnnnnnnnnnnnnnnnnnnnnnnnnnnnnnnnnnnnnnnnnnnnnnnnnnnnnnnnnnnnnnnnnnnnnnnnnnnnnnnnnnnnnnnnnnnnnnnnnnnnnnnnnnnnnnnnnnnnnnnnnnnnnnnnnnnnnnnnnnnnnnnnnnnnnnnnnnnnnnnnnnnnnnnnnnnnnnnnnnnnnnnnnnnnnnnnnnnnnnnnnnnnnnnnnnnnnnnnnnnnnnnnnnnnnnnnnnnnnnnnnnnnnnnnnnnnnnnnnnnnnnnnnnnnnnnnnnnnnnnnnnnnnnnnnnnnnnnnnnnnnnnnnnnnnnnnnnnnnnnnnnnnnnnnnnnnnnnnnnnnnnnnnnnnnnnnnnnnnnnnnnnnnnnnnnnnnnnnnnnnnnnnnnnnnnnnnnnnnnnnnnnnnnnnnnnnnnnnnnnnnnnnnnnnnnnnnnnnnnnnnnnnnnnnnnnnnnnnnnnnnnnnnnnnnnnnnnnnnnnnnnnnnnnnnnnnnnnnnnnnnnnnnnnnnnnnnnnnnnnnnnnnnnnnnnnnnnnnnnnnnnnnnnnnnnnnnnnnnnnnnnnnnnnnnnnnnnnnnnnnnnnnnnnnnnnnnnnnnnnnnnnnnnnnnnnnnnnnnnnnnnnnnnnnnnnnnnnnnnnnnnnnnnnnnnnnnnnnnnnnnnnnnnnnnnnnnnnnnnnnnnnnnnnnnnnnnnnnnnnnnnnnnnnnnnnnnnnnnnnnnnnnnnnnnnnnnnnnnnnnnnnnnnnnnnnnnnnnnnnnnnnnnnnnnnnnnnnnnnnnnnnnnnnnnnnnnnnnnnnnnnnnnnnnnnnnnnnnnnnnnnnnnnnnnnnnnnnnnnnnnnnnnnnnnnnnnnnnnnnnnnnnnnnnnnnnnnnnnnnnnnnnnnnnnnnnnnnnnnnnnnnnnnnnnnnnnnnnnnnnnnnnnnnnnnnnnnnnnnnnnnnnnnnnnnnnnnnnnnnnnnnnnnnnnnnnnnnnnnnnnnnnnnnnnnnnnnnnnnnnnnnnnnnnnnnnnnnnnnnnnnnnnnnnnnnnnnnnnnnnnnnnnnnnnnnnnnnnnnnnnnnnnnnnnnnnnnnnnnnnnnnnnnnnnnnnnnnnnnnnnnnnnnnnnnnnnnnnnnnnnnnnnnnnnnnnnnnnnnnnnnnnnnnnnnnnnnnnnnnnnnnnnnnnnnnnnnnnnnnnnnnnnnnnnnnnnnnnnnnnnnnnnnnnnnnnnnnnnnnnnnnnnnnnnnnnnnnnnnnnnnnnnnnnnnnnnnnnnnnnnnnnnnnnnnnnnnnnnnnnnnnnnnnnnnnnnnnnnnnnnnnnnnnnnnnnnnnnnnnnnnnnnnnnnnnnnnnnnnnnnnnnnnnnnnnnnnnnnnnnnnnnnnnnnnnnnnnnnnnnnnnnnnnnnnnnnnnnnnnnnnnnnnnnnnnnnnnnnnnnnnnnnnnnnnnnnnnnnnnnnnnnnnnnnnnnnnnnnnnnnnnnnnnnnnnnnnnnnnnnnnnnnnnnnnnnnnnnnnnnnnnnnnnnnnnnnnnnnnnnnnnnnnnnnnnnnnnnnnnnnnnnnnnnnnnnnnnnnnnnnnnnnnnnnnnnnnnnnnnnnnnnnnnnnnnnnnnnnnnnnnnnnnnnnnnnnnnnnnnnnnnnnnnnnnnnnnnnnnnnnnnnnnnnnnnnnnnnnnnnnnnnnnnnnnnnnnnnnnnnnnnnnnnnnnnnnnnnnnnnnnnnnnnnnnnnnnnnnnnnnnnnnnnnnnnnnnnnnnnnnnnnnnnnnnnnnnnnnnnnnnnnnnnnnnnnnnnnnnnnnnnnnnnnnnnnnnnnnnnnnnnnnnnnnnnnnnnnnnnnnnnnnnnnnnnnnnnnnnnnnnnnnnnnnnnnnnnnnnnnnnnnnnnnnnnnnnnnnnnnnnnnnnnnnnnnnnnnnnnnnnnnnnnnnnnnnnnnnnnnnnnnnnnnnnnnnnnnnnnnnnnnnnnnnnnnnnnnnnnnnnnnnnnnnnnnnnnnnnnnnnnnnnnnnnnnnnnnnnnnnnnnnnnnnnnnnnnnnnnnnnnnnnnnnnnnnnnnnnnnnnnnnnnnnnnnnnnnnnnnnnnnnnnnnnnnnnnnnnnnnnnnnnnnnnnnnnnnnnnnnnnnnnnnnnnnnnnnnnnnnnnnnnnnnnnnnnnnnnnnnnnnnnnnnnnnnnnnnnnnnnnnnnnnnnnnnnnnnnnnnnnnnnnnnnnnnnnnnnnnnnnnnnnnnnnnnnnnnnnnnnnnnnnnnnnnnnnnnnnnnnnnnnnnnnnnnnnnnnnnnnnnnnnnnnnnnnnnnnnnnnnnnnnnnnnnnnnnnnnnnnnnnnnnnnnnnnnnnnnnnnnnnnnnnnnnnnnnnnnnnnnnnnnnnnnnnnnnnnnnnnnnnnnnnnnnnnnnnnnnnnnnnnnnnnnnnnnnnnnnnnnnnnnnnnnnnnnnnnnnnnnnnnnnnnnnnnnnnnnnnnnnnnnnnnnnnnnnnnnnnnnnnnnnnnnnnnnnnnnnnnnnnnnnnnnnnnnnnnnnnnnnnnnnnnnnnnnnnnnnnnnnnnnnnnnnnnnnnnnnnnnnnnnnnnnnnnnnnnnnnnnnnnnnnnnnnnnnnnnnnnnnnnnnnnnnnnnnnnnnnnnnnnnnnnnnnnnnnnnnnnnnnnnnnnnnnnnnnnnnnnnnnnnnnnnnnnnnnnnnnnnnnnnnnnnnnnnnnnnnnnnnnnnnnnnnnnnnnnnnnnnnnnnnnnnnnnnnnnnnnnnnnnnnnnnnnnnnnnnnnnnnnnnnnnnnnnnnnnnnnnnnnnnnnnnnnnnnnnnnnnnnnnnnnnnnnnnnnnnnnnnnnnnnnnnnnnnnnnnnnnnnnnnnnnnnnnnnnnnnnnnnnnnnnnnnnnnnnnnnnnnnnnnnnnnnnnnnnnnnnnnnnnnnnnnnnnnnnnnnnnnnnnnnnnnnnnnnnnnnnnnnnnnnnnnnnnnnnnnnnnnnnnnnnnnnnnnnnnnnnnnnnnnnnnnnnnnnnnnnnnnnnnnnnnnnnnnnnnnnnnnnnnnnnnnnnnnnnnnnnnnnnnnnnnnnnnnnnnnnnnnnnnnnnnnnnnnnnnnnnnnnnnnnnnnnnnnnnnnnnnnnnnnnnnnnnnnnnnnnnnnnnnnnnnnnnnnnnnnnnnnnnnnnnnnnnnnnnnnnnnnnnnnnnnnnnnnnnnnnnnnnnnnnnnnnnnnnnnnnnnnnnnnnnnnnnnnnnnnnnnnnnnnnnnnnnnnnnnnnnnnnnnnnnnnnnnnnnnnnnnnnnnnnnnnnnnnnnnnnnnnnnnnnnnnnnnnnnnnnnnnnnnnnnnnnnnnnnnnnnnnnnnnnnnnnnnnnnnnnnnnnnnnnnnnnnnnnnnnnnnnnnnnnnnnnnnnnnnnnnnnnnnnnnnnnnnnnnnnnnnnnnnnnnnnnnnnnnnnnnnnnnnnnnnnnnnnnnnnnnnnnnnnnnnnnnnnnnnnnnnnnnnnnnnnnnnnnnnnnnnnnnnnnnnnnnnnnnnnnnnnnnnnnnnnnnnnnnnnnnnnnnnnnnnnnnnnnnnnnnnnnnnnnnnnnnnnnnnnnnnnnnnnnnnnnnnnnnnnnnnnnnnnnnnnnnnnnnnnnnnnnnnnnnnnnnnnnnnnnnnnnnnnnnnnnnnnnnnnnnnnnnnnnnnnnnnnnnnnnnnnnnnnnnnnnnnnnnnnnnnnnnnnnnnnnnnnnnnnnnnnnnnnnnnnnnnnnnnnnnnnnnnnnnnnnnnnnnnnnnnnnnnnnnnnnnnnnnnnnnnnnnnnnnnnnnnnnnnnnnnnnnnnnnnnnnnnnnnnnnnnnnnnnnnnnnnnnnnnnnnnnnnnnnnnnnnnnnnnnnnnnnnnnnnnnnnnnnnnnnnnnnnnnnnnnnnnnnnnnnnnnnnnnnnnnnnnnnnnnnnnnnnnnnnnnnnnnnnnnnnnnnnnnnnnnnnnnnnnnnnnnnnnnnnnnnnnnnnnnnnnnnnnnnnnnnnnnnnnnnnnnnnnnnnnnnnnnnnnnnnnnnnnnnnnnnnnnnnnnnnnnnnnnnnnnnnnnnnnnnnnnnnnnnnnnnnnnnnnnnnnnnnnnnnnnnnnnnnnnnnnnnnnnnnnnnnnnnnnnnnnnnnnnnnnnnnnnnnnnnnnnnnnnnnnnnnnnnnnnnnnnnnnnnnnnnnnnnnnnnnnnnnnnnnnnnnnnnnnnnnnnnnnnnnnnnnnnnnnnnnnnnnnnnnnnnnnnnnnnnnnnnnnnnnnnnnnnnnnnnnnnnnnnnnnnnnnnnnnnnnnnnnnnnnnnnnnnnnnnnnnnnnnnnnnnnnnnnnnnnnnnnnnnnnnnnnnnnnnnnnnnnnnnnnnnnnnnnnnnnnnnnnnnnnnnnnnnnnnnnnnnnnnnnnnnnnnnnnnnnnnnnnnnnnnnnnnnnnnnnnnnnnnnnnnnnnnnnnnnnnnnnnnnnnnnnnnnnnnnnnnnnnnnnnnnnnnnnnnnnnnnnnnnnnnnnnnnnnnnnnnnnnnnnnnnnnnnnnnnnnnnnnnnnnnnnnnnnnnnnnnnnnnnnnnnnnnnnnnnnnnnnnnnnnnnnnnnnnnnnnnnnnnnnnnnnnnnnnnnnnnnnnnnnnnnnnnnnnnnnnnnnnnnnnnnnnnnnnnnnnnnnnnnnnnnnnnnnnnnnnnnnnnnnnnnnnnnnnnnnnnnnnnnnnnnnnnnnnnnnnnnnnnnnnnnnnnnnnnnnnnnnnnnnnnnnnnnnnnnnnnnnnnnnnnnnnnnnnnnnnnnnnnnnnnnnnnnnnnnnnnnnnnnnnnnnnnnnnnnnnnnnnnnnnnnnnnnnnnnnnnnnnnnnnnnnnnnnnnnnnnnnnnnnnnnnnnnnnnnnnnnnnnnnnnnnnnnnnnnnnnnnnnnnnnnnnnnnnnnnnnnnnnnnnnnnnnnnnnnnnnnnnnnnnnnnnnnnnnnnnnnnnnnnnnnnnnnnnnnnnnnnnnnnnnnnnnnnnnnnnnnnnnnnnnnnnnnnnnnnnnnnnnnnnnnnnnnnnnnnnnnnnnnnnnnnnnnnnnnnnnnnnnnnnnnnnnnnnnnnnnnnnnnnnnnnnnnnnnnnnnnnnnnnnnnnnnnnnnnnnnnnnnnnnnnnnnnnnnnnnnnnnnnnnnnnnnnnnnnnnnnnnnnnnnnnnnnnnnnnnnnnnnnnnnnnnnnnnnnnnnnnnnnnnnnnnnnnnnnnnnnnnnnnnnnnnnnnnnnnnnnnnnnnnnnnnnnnnnnnnnnnnnnnnnnnnnnnnnnnnnnnnnnnnnnnnnnnnnnnnnnnnnnnnnnnnnnnnnnnnnnnnnnnnnnnnnnnnnnnnnnnnnnnnnnnnnnnnnnnnnnnnnnnnnnnnnnnnnnnnnnnnnnnnnnnnnnnnnnnnnnnnnnnnnnnnnnnnnnnnnnnnnnnnnnnnnnnnnnnnnnnnnnnnnnnnnnnnnnnnnnnnnnnnnnnnnnnnnnnnnnnnnnnnnnnnnnnnnnnnnnnnnnnnnnnnnnnnnnnnnnnnnnnnnnnnnnnnnnnnnnnnnnnnnnnnnnnnnnnnnnnnnnnnnnnnnnnnnnnnnnnnnnnnnnnnnnnnnnnnnnnnnnnnnnnnnnnnnnnnnnnnnnnnnnnnnnnnnnnnnnnnnnnnnnnnnnnnnnnnnnnnnnnnnnnnnnnnnnnnnnnnnnnnnnnnnnnnnnnnnnnnnnnnnnnnnnnnnnnnnnnnnnnnnnnnnnnnnnnnnnnnnnnnnnnnnnnnnnnnnnnnnnnnnnnnnnnnnnnnnnnnnnnnnnnnnnnnnnnnnnnnnnnnnnnnnnnnnnnnnnnnnnnnnnnnnnnnnnnnnnnnnnnnnnnnnnnnnnnnnnnnnnnnnnnnnnnnnnnnnnnnnnnnnnnnnnnnnnnnnnnnnnnnnnnnnnnnnnnnnnnnnnnnnnnnnnnnnnnnnnnnnnnnnnnnnnnnnnnnnnnnnnnnnnnnnnnnnnnnnnnnnnnnnnnnnnnnnnnnnnnnnnnnnnnnnnnnnnnnnnnnnnnnnnnnnnnnnnnnnnnnnnnnnnnnnnnnnnnnnnnnnnnnnnnnnnnnnnnnnnnnnnnnnnnnnnnnnnnnnnnnnnnnnnnnnnnnnnnnnnnnnnnnnnnnnnnnnnnnnnnnnnnnnnnnnnnnnnnnnnnnnnnnnnnnnnnnnnnnnnnnnnnnnnnnnnnnnnnnnnnnnnnnnnnnnnnnnnnnnnnnnnnnnnnnnnnnnnnnnnnnnnnnnnnnnnnnnnnnnnnnnnnnnnnnnnnnnnnnnnnnnnnnnnnnnnnnnnnnnnnnnnnnnnnnnnnnnnnnnnnnnnnnnnnnnnnnnnnnnnnnnnnnnnnnnnnnnnnnnnnnnnnnnnnnnnnnnnnnnnnnnnnnnnnnnnnnnnnnnnnnnnnnnnnnnnnnnnnnnnnnnnnnnnnnnnnnnnnnnnnnnnnnnnnnnnnnnnnnnnnnnnnnnnnnnnnnnnnnnnnnnnnnnnnnnnnnnnnnnnnnnnnnnnnnnnnnnnnnnnnnnnnnnnnnnnnnnnnnnnnnnnnnnnnnnnnnnnnnnnnnnnnnnnnnnnnnnnnnnnnnnnnnnnnnnnnnnnnnnnnnnnnnnnnnnnnnnnnnnnnnnnnnnnnnnnnnnnnnnnnnnnnnnnnnnnnnnnnnnnnnnnnnnnnnnnnnnnnnnnnnnnnnnnnnnnnnnnnnnnnnnnnnnnnnnnnnnnnnnnnnnnnnnnnnnnnnnnnnnnnnnnnnnnnnnnnnnnnnnnnnnnnnnnnnnnnnnnnnnnnnnnnnnnnnnnnnnnnnnnnnnnnnnnnnnnnnnnnnnnnnnnnnnnnnnnnnnnnnnnnnnnnnnnnnnnnnnnnnnnnnnnnnnnnnnnnnnnnnnnnnnnnnnnnnnnnnnnnnnnnnnnnnnnnnnnnnnnnnnnnnnnnnnnnnnnnnnnnnnnnnnnnnnnnnnnnnnnnnnnnnnnnnnnnnnnnnnnnnnnnnnnnnnnnnnnnnnnnnnnnnnnnnnnnnnnnnnnnnnnnnnnnnnnnnnnnnnnnnnnnnnnnnnnnnnnnnnnnnnnnnnnnnnnnnnnnnnnnnnnnnnnnnnnnnnnnnnnnnnnnnnnnnnnnnnnnnnnnnnnnnnnnnnnnnnnnnnnnnnnnnnnnnnnnnnnnnnnnnnnnnnnnnnnnnnnnnnnnnnnnnnnnnnnnnnnnnnnnnnnnnnnnnnnnnnnnnnnnnnnnnnnnnnnnnnnnnnnnnnnnnnnnnnnnnnnnnnnnnnnnnnnnnnnnnnnnnnnnnnnnnnnnnnnnnnnnnnnnnnnnnnnnnnnnnnnnnnnnnnnnnnnnnnnnnnnnnnnnnnnnnnnnnnnnnnnnnnnnnnnnnnnnnnnnnnnnnnnnnnnnnnnnnnnnnnnnnnnnnnnnnnnnnnnnnnnnnnnnnnnnnnnnnnnnnnnnnnnnnnnnnnnnnnnnnnnnnnnnnnnnnnnnnnnnnnnnnnnnnnnnnnnnnnnnnnnnnnnnnnnnnnnnnnnnnnnnnnnnnnnnnnnnnnnnnnnnnnnnnnnnnnnnnnnnnnnnnnnnnnnnnnnnnnnnnnnnnnnnnnnnnnnnnnnnnnnnnnnnnnnnnnnnnnnnnnnnnnnnnnnnnnnnnnnnnnnnnnnnnnnnnnnnnnnnnnnnnnnnnnnnnnnnnnnnnnnnnnnnnnnnnnnnnnnnnnnnnnnnnnnnnnnnnnnnnnnnnnnnnnnnnnnnnnnnnnnnnnnnnnnnnnnnnnnnnnnnnnnnnnnnnnnnnnnnnnnnnnnnnnnnnnnnnnnnnnnnnnnnnnnnnnnnnnnnnnnnnnnnnnnnnnnnnnnnnnnnnnnnnnnnnnnnnnnnnnnnnnnnnnnnnnnnnnnnnnnnnnnnnnnnnnnnnnnnnnnnnnnnnnnnnnnnnnnnnnnnnnnnnnnnnnnnnnnnnnnnnnnnnnnnnnnnnnnnnnnnnnnnnnnnnnnnnnnnnnnnnnnnnnnnnnnnnnnnnnnnnnnnnnnnnnnnnnnnnnnnnnnnnnnnnnnnnnnnnnnnnnnnnnnnnnnnnnnnnnnnnnnnnnnnnnnnnnnnnnnnnnnnnnnnnnnnnnnnnnnnnnnnnnnnnnnnnnnnnnnnnnnnnnnnnnnnnnnnnnnnnnnnnnnnnnnnnnnnnnnnnnnnnnnnnnnnnnnnnnnnnnnnnnnnnnnnnnnnnnnnnnnnnnnnnnnnnnnnnnnnnnnnnnnnnnnnnnnnnnnnnnnnnnnnnnnnnnnnnnnnnnnnnnnnnnnnnnnnnnnnnnnnnnnnnnnnnnnnnnnnnnnnnnnnnnnnnnnnnnnnnnnnnnnnnnnnnnnnnnnnnnnnnnnnnnnnnnnnnnnnnnnnnnnnnnnnnnnnnnnnnnnnnnnnnnnnnnnnnnnnnnnnnnnnnnnnnnnnnnnnnnnnnnnnnnnnnnnnnnnnnnnnnnnnnnnnnnnnnnnnnnnnnnnnnnnnnnnnnnnnnnnnnnnnnnnnnnnnnnnnnnnnnnnnnnnnnnnnnnnnnnnnnnnnnnnnnnnnnnnnnnnnnnnnnnnnnnnnnnnnnnnnnnnnnnnnnnnnnnnnnnnnnnnnnnnnnnnnnnnnnnnnnnnnnnnnnnnnnnnnnnnnnnnnnnnnnnnnnnnnnnnnnnnnnnnnnnnnnnnnnnnnnnnnnnnnnnnnnnnnnnnnnnnnnnnnnnnnnnnnnnnnnnnnnnnnnnnnnnnnnnnnnnnnnnnnnnnnnnnnnnnnnnnnnnnnnnnnnnnnnnnnnnnnnnnnnnnnnnnnnnnnnnnnnnnnnnnnnnnnnnnnnnnnnnnnnnnnnnnnnnnnnnnnnnnnnnnnnnnnnnnnnnnnnnnnnnnnnnnnnnnnnnnnnnnnnnnnnnnnnnnnnnnnnnnnnnnnnnnnnnnnnnnnnnnnnnnnnnnnnnnnnnnnnnnnnnnnnnnnnnnnnnnnnnnnnnnnnnnnnnnnnnnnnnnnnnnnnnnnnnnnnnnnnnnnnnnnnnnnnnnnnnnnnnnnnnnnnnnnnnnnnnnnnnnnnnnnnnnnnnnnnnnnnnnnnnnnnnnnnnnnnnnnnnnnnnnnnnnnnnnnnnnnnnnnnnnnnnnnnnnnnnnnnnnnnnnnnnnnnnnnnnnnnnnnnnnnnnnnnnnnnnnnnnnnnnnnnnnnnnnnnnnnnnnnnnnnnnnnnnnnnnnnnnnnnnnnnnnnnnnnnnnnnnnnnnnnnnnnnnnnnnnnnnnnnnnnnnnnnnnnnnnnnnnnnnnnnnnnnnnnnnnnnnnnnnnnnnnnnnnnnnnnnnnnnnnnnnnnnnnnnnnnnnnnnnnnnnnnnnnnnnnnnnnnnnnnnnnnnnnnnnnnnnnnnnnnnnnnnnnnnnnnnnnnnnnnnnnnnnnnnnnnnnnnnnnnnnnnnnnnnnnnnnnnnnnnnnnnnnnnnnnnnnnnnnnnnnnnnnnnnnnnnnnnnnnnnnnnnnnnnnnnnnnnnnnnnnnnnnnnnnnnnnnnnnnnnnnnnnnnnnnnnnnnnnnnnnnnnnnnnnnnnnnnnnnnnnnnnnnnnnnnnnnnnnnnnnnnnnnnnnnnnnnnnnnnnnnnnnnnnnnnnnnnnnnnnnnnnnnnnnnnnnnnnnnnnnnnnnnnnnnnnnnnnnnnnnnnnnnnnnnnnnnnnnnnnnnnnnnnnnnnnnnnnnnnnnnnnnnnnnnnnnnnnnnnnnnnnnnnnnnnnnnnnnnnnnnnnnnnnnnnnnnnnnnnnnnnnnnnnnnnnnnnnnnnnnnnnnnnnnnnnnnnnnnnnnnnnnnnnnnnnnnnnnnnnnnnnnnnnnnnnnnnnnnnnnnnnnnnnnnnnnnnnnnnnnnnnnnnnnnnnnnnnnnnnnnnnnnnnnnnnnnnnnnnnnnnnnnnnnnnnnnnnnnnnnnnnnnnnnnnnnnnnnnnnnnnnnnnnnnnnnnnnnnnnnnnnnnnnnnnnnnnnnnnnnnnnnnnnnnnnnnnnnnnnnnnnnnnnnnnnnnnnnnnnnnnnnnnnnnnnnnnnnnnnnnnnnnnnnnnnnnnnnnnnnnnnnnnnnnnnnnnnnnnnnnnnnnnnnnnnnnnnnnnnnnnnnnnnnnnnnnnnnnnnnnnnnnnnnnnnnnnnnnnnnnnnnnnnnnnnnnnnnnnnnnnnnnnnnnnnnnnnnnnnnnnnnnnnnnnnnnnnnnnnnnnnnnnnnnnnnnnnnnnnnnnnnnnnnnnnnnnnnnnnnnnnnnnnnnnnnnnnnnnnnnnnnnnnnnnnnnnnnnnnnnnnnnnnnnnnnnnnnnnnnnnnnnnnnnnnnnnnnnnnnnnnnnnnnnnnnnnnnnnnnnnnnnnnnnnnnnnnnnnnnnnnnnnnnnnnnnnnnnnnnnnnnnnnnnnnnnnnnnnnnnnnnnnnnnnnnnnnnnnnnnnnnnnnnnnnnnnnnnnnnnnnnnnnnnnnnnnnnnnnnnnnnnnnnnnnnnnnnnnnnnnnnnnnnnnnnnnnnnnnnnnnnnnnnnnnnnnnnnnnnnnnnnnnnnnnnnnnnnnnnnnnnnnnnnnnnnnnnnnnnnnnnnnnnnnnnnnnnnnnnnnnnnnnnnnnnnnnnnnnnnnnnnnnnnnnnnnnnnnnnnnnnnnnnnnnnnnnnnnnnnnnnnnnnnnnnnnnnnnnnnnnnnnnnnnnnnnnnnnnnnnnnnnnnnnnnnnnnnnnnnnnnnnnnnnnnnnnnnnnnnnnnnnnnnnnnnnnnnnnnnnnnnnnnnnnnnnnnnnnnnnnnnnnnnnnnnnnnnnnnnnnnnnnnnnnnnnnnnnnnnnnnnnnnnnnnnnnnnnnnnnnnnnnnnnnnnnnnnnnnnnnnnnnnnnnnnnnnnnnnnnnnnnnnnnnnnnnnnnnnnnnnnnnnnnnnnnnnnnnnnnnnnnnnnnnnnnnnnnnnnnnnnnnnnnnnnnnnnnnnnnnnnnnnnnnnnnnnnnnnnnnnnnnnnnnnnnnnnnnnnnnnnnnnnnnnnnnnnnnnnnnnnnnnnnnnnnnnnnnnnnnnnnnnnnnnnnnnnnnnnnnnnnnnnnnnnnnnnnnnnnnnnnnnnnnnnnnnnnnnnnnnnnnnnnnnnnnnnnnnnnnnnnnnnnnnnnnnnnnnnnnnnnnnnnnnnnnnnnnnnnnnnnnnnnnnnnnnnnnnnnnnnnnnnnnnnnnnnnnnnnnnnnnnnnnnnnnnnnnnnnnnnnnnnnnnnnnnnnnnnnnnnnnnnnnnnnnnnnnnnnnnnnnnnnnnnnnnnnnnnnnnnnnnnnnnnnnnnnnnnnnnnnnnnnnnnnnnnnnnnnnnnnnnnnnnnnnnnnnnnnnnnnnnnnnnnnnnnnnnnnnnnnnnnnnnnnnnnnnnnnnnnnnnnnnnnnnnnnnnnnnnnnnnnnnnnnnnnnnnnnnnnnnnnnnnnnnnnnnnnnnnnnnnnnnnnnnnnnnnnnnnnnnnnnnnnnnnnnnnnnnnnnnnnnnnnnnnnnnnnnnnnnnnnnnnnnnnnnnnnnnnnnnnnnnnnnnnnnnnnnnnnnnnnnnnnnnnnnnnnnnnnnnnnnnnnnnnnnnnnnnnnnnnnnnnnnnnnnnnnnnnnnnnnnnnnnnnnnnnnnnnnnnnnnnnnnnnnnnnnnnnnnnnnnnnnnnnnnnnnnnnnnnnnnnnnnnnnnnnnnnnnnnnnnnnnnnnnnnnnnnnnnnnnnnnnnnnnnnnnnnnnnnnnnnnnnnnnnnnnnnnnnnnnnnnnnnnnnnnnnnnnnnnnnnnnnnnnnnnnnnnnnnnnnnnnnnnnnnnnnnnnnnnnnnnnnnnnnnnnnnnnnnnnnnnnnnnnnnnnnnnnnnnnnnnnnnnnnnnnnnnnnnnnnnnnnnnnnnnnnnnnnnnnnnnnnnnnnnnnnnnnnnnnnnnnnnnnnnnnnnnnnnnnnnnnnnnnnnnnnnnnnnnnnnnnnnnnnnnnnnnnnnnnnnnnnnnnnnnnnnnnnnnnnnnnnnnnnnnnnnnnnnnnnnnnnnnnnnnnnnnnnnnnnnnnnnnnnnnnnnnnnnnnnnnnnnnnnnnnnnnnnnnnnnnnnnnnnnnnnnnnnnnnnnnnnnnnnnnnnnnnnnnnnnnnnnnnnnnnnnnnnnnnnnnnnnnnnnnnnnnnnnnnnnnnnnnnnnnnnnnnnnnnnnnnnnnnnnnnnnnnnnnnnnnnnnnnnnnnnnnnnnnnnnnnnnnnnnnnnnnnnnnnnnnnnnnnnnnnnnnnnnnnnnnnnnnnnnnnnnnnnnnnnnnnnnnnnnnnnnnnnnnnnnnnnnnnnnnnnnnnnnnnnnnnnnnnnnnnnnnnnnnnnnnnnnnnnnnnnnnnnnnnnnnnnnnnnnnnnnnnnnnnnnnnnnnnnnnnnnnnnnnnnnnnnnnnnnnnnnnnnnnnnnnnnnnnnnnnnnnnnnnnnnnnnnnnnnnnnnnnnnnnnnnnnnnnnnnnnnnnnnnnnnnnnnnnnnnnnnnnnnnnnnnnnnnnnnnnnnnnnnnnnnnnnnnnnnnnnnnnnnnnnnnnnnnnnnnnnnnnnnnnnnnnnnnnnnnnnnnnnnnnnnnnnnnnnnnnnnnnnnnnnnnnnnnnnnnnnnnnnnnnnnnnnnnnnnnnnnnnnnnnnnnnnnnnnnnnnnnnnnnnnnnnnnnnnnnnnnnnnnnnnnnnnnnnnnnnnnnnnnnnnnnnnnnnnnnnnnnnnnnnnnnnnnnnnnnnnnnnnnnnnnnnnnnnnnnnnnnnnnnnnnnnnnnnnnnnnnnnnnnnnnnnnnnnnnnnnnnnnnnnnnnnnnnnnnnnnnnnnnnnnnnnnnnnnnnnnnnnnnnnnnnnnnnnnnnnnnnnnnnnnnnnnnnnnnnnnnnnnnnnnnnnnnnnnnnnnnnnnnnnnnnnnnnnnnnnnnnnnnnnnnnnnnnnnnnnnnnnnnnnnnnnnnnnnnnnnnnnnnnnnnnnnnnnnnnnnnnnnnnnnnnnnnnnnnnnnnnnnnnnnnnnnnnnnnnnnnnnnnnnnnnnnnnnnnnnnnnnnnnnnnnnnnnnnnnnnnnnnnnnnnnnnnnnnnnnnnnnnnnnnnnnnnnnnnnnnnnnnnnnnnnnnnnnnnnnnnnnnnnnnnnnnnnnnnnnnnnnnnnnnnnnnnnnnnnnnnnnnnnnnnnnnnnnnnnnnnnnnnnnnnnnnnnnnnnnnnnnnnnnnnnnnnnnnnnnnnnnnnnnnnnnnnnnnnnnnnnnnnnnnnnnnnnnnnnnnnnnnnnnnnnnnnnnnnnnnnnnnnnnnnnnnnnnnnnnnnnnnnnnnnnnnnnnnnnnnnnnnnnnnnnnnnnnnnnnnnnnnnnnnnnnnnnnnnnnnnnnnnnnnnnnnnnnnnnnnnnnnnnnnnnnnnnnnnnnnnnnnnnnnnnnnnnnnnnnnnnnnnnnnnnnnnnnnnnnnnnnnnnnnnnnnnnnnnnnnnnnnnnnnnnnnnnnnnnnnnnnnnnnnnnnnnnnnnnnnnnnnnnnnnnnnnnnnnnnnnnnnnnnnnnnnnnnnnnnnnnnnnnnnnnnnnnnnnnnnnnnnnnnnnnnnnnnnnnnnnnnnnnnnnnnnnnnnnnnnnnnnnnnnnnnnnnnnnnnnnnnnnnnnnnnnnnnnnnnnnnnnnnnnnnnnnnnnnnnnnnnnnnnnnnnnnnnnnnnnnnnnnnnnnnnnnnnnnnnnnnnnnnnnnnnnnnnnnnnnnnnnnnnnnnnnnnnnnnnnnnnnnnnnnnnnnnnnnnnnnnnnnnnnnnnnnnnnnnnnnnnnnnnnnnnnnnnnnnnnnnnnnnnnnnnnnnnnnnnnnnnnnnnnnnnnnnnnnnnnnnnnnnnnnnnnnnnnnnnnnnnnnnnnnnnnnnnnnnnnnnnnnnnnnnnnnnnnnnnnnnnnnnnnnnnnnnnnnnnnnnnnnnnnnnnnnnnnnnnnnnnnnnnnnnnnnnnnnnnnnnnnnnnnnnnnnnnnnnnnnnnnnnnnnnnnnnnnnnnnnnnnnnnnnnnnnnnnnnnnnnnnnnnnnnnnnnnnnnnnnnnnnnnnnnnnnnnnnnnnnnnnnnnnnnnnnnnnnnnnnnnnnnnnnnnnnnnnnnnnnnnnnnnnnnnnnnnnnnnnnnnnnnnnnnnnnnnnnnnnnnnnnnnnnnnnnnnnnnnnnnnnnnnnnnnnnnnnnnnnnnnnnnnnnnnnnnnnnnnnnnnnnnnnnnnnnnnnnnnnnnnnnnnnnnnnnnnnnnnnnnnnnnnnnnnnnnnnnnnnnnnnnnnnnnnnnnnnnnnnnnnnnnnnnnnnnnnnnnnnnnnnnnnnnnnnnnnnnnnnnnnnnnnnnnnnnnnnnnnnnnnnnnnnnnnnnnnnnnnnnnnnnnnnnnnnnnnnnnnnnnnnnnnnnnnnnnnnnnnnnnnnnnnnnnnnnnnnnnnnnnnnnnnnnnnnnnnnnnnnnnnnnnnnnnnnnnnnnnnnnnnnnnnnnnnnnnnnnnnnnnnnnnnnnnnnnnnnnnnnnnnnnnnnnnnnnnnnnnnnnnnnnnnnnnnnnnnnnnnnnnnnnnnnnnnnnnnnnnnnnnnnnnnnnnnnnnnnnnnnnnnnnnnnnnnnnnnnnnnnnnnnnnnnnnnnnnnnnnnnnnnnnnnnnnnnnnnnnnnnnnnnnnnnnnnnnnnnnnnnnnnnnnnnnnnnnnnnnnnnnnnnnnnnnnnnnnnnnnnnnnnnnnnnnnnnnnnnnnnnnnnnnnnnnnnnnnnnnnnnnnnnnnnnnnnnnnnnnnnnnnnnnnnnnnnnnnnnnnnnnnnnnnnnnnnnnnnnnnnnnnnnnnnnnnnnnnnnnnnnnnnnnnnnnnnnnnnnnnnnnnnnnnnnnnnnnnnnnnnnnnnnnnnnnnnnnnnnnnnnnnnnnnnnnnnnnnnnnnnnnnnnnnnnnnnnnnnnnnnnnnnnnnnnnnnnnnnnnnnnnnnnnnnnnnnnnnnnnnnnnnnnnnnnnnnnnnnnnnnnnnnnnnnnnnnnnnnnnnnnnnnnnnnnnnnnnnnnnnnnnnnnnnnnnnnnnnnnnnnnnnnnnnnnnnnnnnnnnnnnnnnnnnnnnnnnnnnnnnnnnnnnnnnnnnnnnnnnnnnnnnnnnnnnnnnnnnnnnnnnnnnnnnnnnnnnnnnnnnnnnnnnnnnnnnnnnnnnnnnnnnnnnnnnnnnnnnnnnnnnnnnnnnnnnnnnnnnnnnnnnnnnnnnnnnnnnnnnnnnnnnnnnnnnnnnnnnnnnnnnnnnnnnnnnnnnnnnnnnnnnnnnnnnnnnnnnnnnnnnnnnnnnnnnnnnnnnnnnnnnnnnnnnnnnnnnnnnnnnnnnnnnnnnnnnnnnnnnnnnnnnnnnnnnnnnnnnnnnnnnnnnnnnnnnnnnnnnnnnnnnnnnnnnnnnnnnnnnnnnnnnnnnnnnnnnnnnnnnnnnnnnnnnnnnnnnnnnnnnnnnnnnnnnnnnnnnnnnnnnnnnnnnnnnnnnnnnnnnnnnnnnnnnnnnnnnnnnnnnnnnnnnnnnnnnnnnnnnnnnnnnnnnnnnnnnnnnnnnnnnnnnnnnnnnnnnnnnnnnnnnnnnnnnnnnnnnnnnnnnnnnnnnnnnnnnnnnnnnnnnnnnnnnnnnnnnnnnnnnnnnnnnnnnnnnnnnnnnnnnnnnnnnnnnnnnnnnnnnnnnnnnnnnnnnnnnnnnnnnnnnnnnnnnnnnnnnnnnnnnnnnnnnnnnnnnnnnnnnnnnnnnnnnnnnnnnnnnnnnnnnnnnnnnnnnnnnnnnnnnnnnnnnnnnnnnnnnnnnnnnnnnnnnnnnnnnnnnnnnnnnnnnnnnnnnnnnnnnnnnnnnnnnnnnnnnnnnnnnnnnnnnnnnnnnnnnnnnnnnnnnnnnnnnnnnnnnnnnnnnnnnnnnnnnnnnnnnnnnnnnnnnnnnnnnnnnnnnnnnnnnnnnnnnnnnnnnnnnnnnnnnnnnnnnnnnnnnnnnnnnnnnnnnnnnnnnnnnnnnnnnnnnnnnnnnnnnnnnnnnnnnnnnnnnnnnnnnnnnnnnnnnnnnnnnnnnnnnnnnnnnnnnnnnnnnnnnnnnnnnnnnnnnnnnnnnnnnnnnnnnnnnnnnnnnnnnnnnnnnnnnnnnnnnnnnnnnnnnnnnnnnnnnnnnnnnnnnnnnnnnnnnnnnnnnnnnnnnnnnnnnnnnnnnnnnnnnnnnnnnnnnnnnnnnnnnnnnnnnnnnnnnnnnnnnnnnnnnnnnnnnnnnnnnnnnnnnnnnnnnnnnnnnnnnnnnnnnnnnnnnnnnnnnnnnnnnnnnnnnnnnnnnnnnnnnnnnnnnnnnnnnnnnnnnnnnnnnnnnnnnnnnnnnnnnnnnnnnnnnnnnnnnnnnnnnnnnnnnnnnnnnnnnnnnnnnnnnnnnnnnnnnnnnnnnnnnnnnnnnnnnnnnnnnnnnnnnnnnnnnnnnnnnnnnnnnnnnnnnnnnnnnnnnnnnnnnnnnnnnnnnnnnnnnnnnnnnnnnnnnnnnnnnnnnnnnnnnnnnnnnnnnnnnnnnnnnnnnnnnnnnnnnnnnnnnnnnnnnnnnnnnnnnnnnnnnnnnnnnnnnnnnnnnnnnnnnnnnnnnnnnnnnnnnnnnnnnnnnnnnnnnnnnnnnnnnnnnnnnnnnnnnnnnnnnnnnnnnnnnnnnnnnnnnnnnnnnnnnnnnnnnnnnnnnnnnnnnnnnnnnnnnnnnnnnnnnnnnnnnnnnnnnnnnnnnnnnnnnnnnnnnnnnnnnnnnnnnnnnnnnnnnnnnnnnnnnnnnnnnnnnnnnnnnnnnnnnnnnnnnnnnnnnnnnnnnnnnnnnnnnnnnnnnnnnnnnnnnnnnnnnnnnnnnnnnnnnnnnnnnnnnnnnnnnnnnnnnnnnnnnnnnnnnnnnnnnnnnnnnnnnnnnnnnnnnnnnnnnnnnnnnnnnnnnnnnnnnnnnnnnnnnnnnnnnnnnnnnnnnnnnnnnnnnnnnnnnnnnnnnnnnnnnnnnnnnnnnnnnnnnnnnnnnnnnnnnnnnnnnnnnnnnnnnnnnnnnnnnnnnnnnnnnnnnnnnnnnnnnnnnnnnnnnnnnnnnnnnnnnnnnnnnnnnnnnnnnnnnnnnnnnnnnnnnnnnnnnnnnnnnnnnnnnnnnnnnnnnnnnnnnnnnnnnnnnnnnnnnnnnnnnnnnnnnnnnnnnnnnnnnnnnnnnnnnnnnnnnnnnnnnnnnnnnnnnnnnnnnnnnnnnnnnnnnnnnnnnnnnnnnnnnnnnnnnnnnnnnnnnnnnnnnnnnnnnnnnnnnnnnnnnnnnnnnnnnnnnnnnnnnnnnnnnnnnnnnnnnnnnnnnnnnnnnnnnnnnnnnnnnnnnnnnnnnnnnnnnnnnnnnnnnnnnnnnnnnnnnnnnnnnnnnnnnnnnnnnnnnnnnnnnnnnnnnnnnnnnnnnnnnnnnnnnnnnnnnnnnnnnnnnnnnnnnnnnnnnnnnnnnnnnnnnnnnnnnnnnnnnnnnnnnnnnnnnnnnnnnnnnnnnnnnnnnnnnnnnnnnnnnnnnnnnnnnnnnnnnnnnnnnnnnnnnnnnnnnnnnnnnnnnnnnnnnnnnnnnnnnnnnnnnnnnnnnnnnnnnnnnnnnnnnnnnnnnnnnnnnnnnnnnnnnnnnnnnnnnnnnnnnnnnnnnnnnnnnnnnnnnnnnnnnnnnnnnnnnnnnnnnnnnnnnnnnnnnnnnnnnnnnnnnnnnnnnnnnnnnnnnnnnnnnnnnnnnnnnnnnnnnnnnnnnnnnnnnnnnnnnnnnnnnnnnnnnnnnnnnnnnnnnnnnnnnnnnnnnnnnnnnnnnnnnnnnnnnnnnnnnnnnnnnnnnnnnnnnnnnnnnnnnnnnnnnnnnnnnnnnnnnnnnnnnnnnnnnnnnnnnnnnnnnnnnnnnnnnnnnnnnnnnnnnnnnnnnnnnnnnnnnnnnnnnnnnnnnnnnnnnnnnnnnnnnnnnnnnnnnnnnnnnnnnnnnnnnnnnnnnnnnnnnnnnnnnnnnnnnnnnnnnnnnnnnnnnnnnnnnnnnnnnnnnnnnnnnnnnnnnnnnnnnnnnnnnnnnnnnnnnnnnnnnnnnnnnnnnnnnnnnnnnnnnnnnnnnnnnnnnnnnnnnnnnnnnnnnnnnnnnnnnnnnnnnnnnnnnnnnnnnnnnnnnnnnnnnnnnnnnnnnnnnnnnnnnnnnnnnnnnnnnnnnnnnnnnnnnnnnnnnnnnnnnnnnnnnnnnnnnnnnnnnnnnnnnnnnnnnnnnnnnnnnnnnnnnnnnnnnnnnnnnnnnnnnnnnnnnnnnnnnnnnnnnnnnnnnnnnnnnnnnnnnnnnnnnnnnnnnnnnnnnnnnnnnnnnnnnnnnnnnnnnnnnnnnnnnnnnnnnnnnnnnnnnnnnnnnnnnnnnnnnnnnnnnnnnnnnnnnnnnnnnnnnnnnnnnnnnnnnnnnnnnnnnnnnnnnnnnnnnnnnnnnnnnnnnnnnnnnnnnnnnnnnnnnnnnnnnnnnnnnnnnnnnnnnnnnnnnnnnnnnnnnnnnnnnnnnnnnnnnnnnnnnnnnnnnnnnnnnnnnnnnnnnnnnnnnnnnnnnnnnnnnnnnnnnnnnnnnnnnnnnnnnnnnnnnnnnnnnnnnnnnnnnnnnnnnnnnnnnnnnnnnnnnnnnnnnnnnnnnnnnnnnnnnnnnnnnnnnnnnnnnnnnnnnnnnnnnnnnnnnnnnnnnnnnnnnnnnnnnnnnnnnnnnnnnnnnnnnnnnnnnnnnnnnnnnnnnnnnnnnnnnnnnnnnnnnnnnnnnnnnnnnnnnnnnnnnnnnnnnnnnnnnnnnnnnnnnnnnnnnnnnnnnnnnnnnnnnnnnnnnnnnnnnnnnnnnnnnnnnnnnnnnnnnnnnnnnnnnnnnnnnnnnnnnnnnnnnnnnnnnnnnnnnnnnnnnnnnnnnnnnnnnnnnnnnnnnnnnnnnnnnnnnnnnnnnnnnnnnnnnnnnnnnnnnnnnnnnnnnnnnnnnnnnnnnnnnnnnnnnnnnnnnnnnnnnnnnnnnnnnnnnnnnnnnnnnnnnnnnnnnnnnnnnnnnnnnnnnnnnnnnnnnnnnnnnnnnnnnnnnnnnnnnnnnnnnnnnnnnnnnnnnnnnnnnnnnnnnnnnnnnnnnnnnnnnnnnnnnnnnnnnnnnnnnnnnnnnnnnnnnnnnnnnnnnnnnnnnnnnnnnnnnnnnnnnnnnnnnnnnnnnnnnnnnnnnnnnnnnnnnnnnnnnnnnnnnnnnnnnnnnnnnnnnnnnnnnnnnnnnnnnnnnnnnnnnnnnnnnnnnnnnnnnnnnnnnnnnnnnnnnnnnnnnnnnnnnnnnnnnnnnnnnnnnnnnnnnnnnnnnnnnnnnnnnnnnnnnnnnnnnnnnnnnnnnnnnnnnnnnnnnnnnnnnnnnnnnnnnnnnnnnnnnnnnnnnnnnnnnnnnnnnnnnnnnnnnnnnnnnnnnnnnnnnnnnnnnnnnnnnnnnnnnnnnnnnnnnnnnnnnnnnnnnnnnnnnnnnnnnnnnnnnnnnnnnnnnnnnnnnnnnnnnnnnnnnnnnnnnnnnnnnnnnnnnnnnnnnnnnnnnnnnnnnnnnnnnnnnnnnnnnnnnnnnnnnnnnnnnnnnnnnnnnnnnnnnnnnnnnnnnnnnnnnnnnnnnnnnnnnnnnnnnnnnnnnnnnnnnnnnnnnnnnnnnnnnnnnnnnnnnnnnnnnnnnnnnnnnnnnnnnnnnnnnnnnnnnnnnnnnnnnnnnnnnnnnnnnnnnnnnnnnnnnnnnnnnnnnnnnnnnnnnnnnnnnnnnnnnnnnnnnnnnnnnnnnnnnnnnnnnnnnnnnnnnnnnnnnnnnnnnnnnnnnnnnnnnnnnnnnnnnnnnnnnnnnnnnnnnnnnnnnnnnnnnnnnnnnnnnnnnnnnnnnnnnnnnnnnnnnnnnnnnnnnnnnnnnnnnnnnnnnnnnnnnnnnnnnnnnnnnnnnnnnnnnnnnnnnnnnnnnnnnnnnnnnnnnnnnnnnnnnnnnnnnnnnnnnnnnnnnnnnnnnnnnnnnnnnnnnnnnnnnnnnnnnnnnnnnnnnnnnnnnnnnnnnnnnnnnnnnnnnnnnnnnnnnnnnnnnnnnnnnnnnnnnnnnnnnnnnnnnnnnnnnnnnnnnnnnnnnnnnnnnnnnnnnnnnnnnnnnnnnnnnnnnnnnnnnnnnnnnnnnnnnnnnnnnnnnnnnnnnnnnnnnnnnnnnnnnnnnnnnnnnnnnnnnnnnnnnnnnnnnnnnnnnnnnnnnnnnnnnnnnnnnnnnnnnnnnnnnnnnnnnnnnnnnnnnnnnnnnnnnnnnnnnnnnnnnnnnnnnnnnnnnnnnnnnnnnnnnnnnnnnnnnnnnnnnnnnnnnnnnnnnnnnnnnnnnnnnnnnnnnnnnnnnnnnnnnnnnnnnnnnnnnnnnnnnnnnnnnnnnnnnnnnnnnnnnnnnnnnnnnnnnnnnnnnnnnnnnnnnnnnnnnnnnnnnnnnnnnnnnnnnnnnnnnnnnnnnnnnnnnnnnnnnnnnnnnnnnnnnnnnnnnnnnnnnnnnnnnnnnnnnnnnnnnnnnnnnnnnnnnnnnnnnnnnnnnnnnnnnnnnnnnnnnnnnnnnnnnnnnnnnnnnnnnnnnnnnnnnnnnnnnnnnnnnnnnnnnnnnnnnnnnnnnnnnnnnnnnnnnnnnnnnnnnnnnnnnnnnnnnnnnnnnnnnnnnnnnnnnnnnnnnnnnnnnnnnnnnnnnnnnnnnnnnnnnnnnnnnnnnnnnnnnnnnnnnnnnnnnnnnnnnnnnnnnnnnnnnnnnnnnnnnnnnnnnnnnnnnnnnnnnnnnnnnnnnnnnnnnnnnnnnnnnnnnnnnnnnnnnnnnnnnnnnnnnnnnnnnnnnnnnnnnnnnnnnnnnnnnnnnnnnnnnnnnnnnnnnnnnnnnnnnnnnnnnnnnnnnnnnnnnnnnnnnnnnnnnnnnnnnnnnnnnnnnnnnnnnnnnnnnnnnnnnnnnnnnnnnnnnnnnnnnnnnnnnnnnnnnnnnnnnnnnnnnnnnnnnnnnnnnnnnnnnnnnnnnnnnnnnnnnnnnnnnnnnnnnnnnnnnnnnnnnnnnnnnnnnnnnnnnnnnnnnnnnnnnnnnnnnnnnnnnnnnnnnnnnnnnnnnnnnnnnnnnnnnnnnnnnnnnnnnnnnnnnnnnnnnnnnnnnnnnnnnnnnnnnnnnnnnnnnnnnnnnnnnnnnnnnnnnnnnnnnnnnnnnnnnnnnnnnnnnnnnnnnnnnnnnnnnnnnnnnnnnnnnnnnnnnnnnnnnnnnnnnnnnnnnnnnnnnnnnnnnnnnnnnnnnnnnnnnnnnnnnnnnnnnnnnnnnnnnnnnnnnnnnnnnnnnnnnnnnnnnnnnnnnnnnnnnnnnnnnnnnnnnnnnnnnnnnnnnnnnnnnnnnnnnnnnnnnnnnnnnnnnnnnnnnnnnnnnnnnnnnnnnnnnnnnnnnnnnnnnnnnnnnnnnnnnnnnnnnnnnnnnnnnnnnnnnnnnnnnnnnnnnnnnnnnnnnnnnnnnnnnnnnnnnnnnnnnnnnnnnnnnnnnnnnnnnnnnnnnnnnnnnnnnnnnnnnnnnnnnnnnnnnnnnnnnnnnnnnnnnnnnnnnnnnnnnnnnnnnnnnnnnnnnnnnnnnnnnnnnnnnnnnnnnnnnnnnnnnnnnnnnnnnnnnnnnnnnnnnnnnnnnnnnnnnnnnnnnnnnnnnnnnnnnnnnnnnnnnnnnnnnnnnnnnnnnnnnnnnnnnnnnnnnnnnnnnnnnnnnnnnnnnnnnnnnnnnnnnnnnnnnnnnnnnnnnnnnnnnnnnnnnnnnnnnnnnnnnnnnnnnnnnnnnnnnnnnnnnnnnnnnnnnnnnnnnnnnnnnnnnnnnnnnnnnnnnnnnnnnnnnnnnnnnnnnnnnnnnnnnnnnnnnnnnnnnnnnnnnnnnnnnnnnnnnnnnnnnnnnnnnnnnnnnnnnnnnnnnnnnnnnnnnnnnnnnnnnnnnnnnnnnnnnnnnnnnnnnnnnnnnnnnnnnnnnnnnnnnnnnnnnnnnnnnnnnnnnnnnnnnnnnnnnnnnnnnnnnnnnnnnnnnnnnnnnnnnnnnnnnnnnnnnnnnnnnnnnnnnnnnnnnnnnnnnnnnnnnnnnnnnnnnnnnnnnnnnnnnnnnnnnnnnnnnnnnnnnnnnnnnnnnnnnnnnnnnnnnnnnnnnnnnnnnnnnnnnnnnnnnnnnnnnnnnnnnnnnnnnnnnnnnnnnnnnnnnnnnnnnnnnnnnnnnnnnnnnnnnnnnnnnnnnnnnnnnnnnnnnnnnnnnnnnnnnnnnnnnnnnnnnnnnnnnnnnnnnnnnnnnnnnnnnnnnnnnnnnnnnnnnnnnnnnnnnnnnnnnnnnnnnnnnnnnnnnnnnnnnnnnnnnnnnnnnnnnnnnnnnnnnnnnnnnnnnnnnnnnnnnnnnnnnnnnnnnnnnnnnnnnnnnnnnnnnnnnnnnnnnnnnnnnnnnnnnnnnnnnnnnnnnnnnnnnnnnnnnnnnnnnnnnnnnnnnnnnnnnnnnnnnnnnnnnnnnnnnnnnnnnnnnnnnnnnnnnnnnnnnnnnnnnnnnnnnnnnnnnnnnnnnnnnnnnnnnnnnnnnnnnnnnnnnnnnnnnnnnnnnnnnnnnnnnnnnnnnnnnnnnnnnnnnnnnnnnnnnnnnnnnnnnnnnnnnnnnnnnnnnnnnnnnnnnnnnnnnnnnnnnnnnnnnnnnnnnnnnnnnnnnnnnnnnnnnnnnnnnnnnnnnnnnnnnnnnnnnnnnnnnnnnnnnnnnnnnnnnnnnnnnnnnnnnnnnnnnnnnnnnnnnnnnnnnnnnnnnnnnnnnnnnnnnnnnnnnnnnnnnnnnnnnnnnnnnnnnnnnnnnnnnnnnnnnnnnnnnnnnnnnnnnnnnnnnnnnnnnnnnnnnnnnnnnnnnnnnnnnnnnnnnnnnnnnnnnnnnnnnnnnnnnnnnnnnnnnnnnnnnnnnnnnnnnnnnnnnnnnnnnnnnnnnnnnnnnnnnnnnnnnnnnnnnnnnnnnnnnnnnnnnnnnnnnnnnnnnnnnnnnnnnnnnnnnnnnnnnnnnnnnnnnnnnnnnnnnnnnnnnnnnnnnnnnnnnnnnnnnnnnnnnnnnnnnnnnnnnnnnnnnnnnnnnnnnnnnnnnnnnnnnnnnnnnnnnnnnnnnnnnnnnnnnnnnnnnnnnnnnnnnnnnnnnnnnnnnnnnnnnnnnnnnnnnnnnnnnnnnnnnnnnnnnnnnnnnnnnnnnnnnnnnnnnnnnnnnnnnnnnnnnnnnnnnnnnnnnnnnnnnnnnnnnnnnnnnnnnnnnnnnnnnnnnnnnnnnnnnnnnnnnnnnnnnnnnnnnnnnnnnnnnnnnnnnnnnnnnnnnnnnnnnnnnnnnnnnnnnnnnnnnnnnnnnnnnnnnnnnnnnnnnnnnnnnnnnnnnnnnnnnnnnnnnnnnnnnnnnnnnnnnnnnnnnnnnnnnnnnnnnnnnnnnnnnnnnnnnnnnnnnnnnnnnnnnnnnnnnnnnnnnnnnnnnnnnnnnnnnnnnnnnnnnnnnnnnnnnnnnnnnnnnnnnnnnnnnnnnnnnnnnnnnnnnnnnnnnnnnnnnnnnnnnnnnnnnnnnnnnnnnnnnnnnnnnnnnnnnnnnnnnnnnnnnnnnnnnnnnnnnnnnnnnnnnnnnnnnnnnnnnnnnnnnnnnnnnnnnnnnnnnnnnnnnnnnnnnnnnnnnnnnnnnnnnnnnnnnnnnnnnnnnnnnnnnnnnnnnnnnnnnnnnnnnnnnnnnnnnnnnnnnnnnnnnnnnnnnnnnnnnnnnnnnnnnnnnnnnnnnnnnnnnnnnnnnnnnnnnnnnnnnnnnnnnnnnnnnnnnnnnnnnnnnnnnnnnnnnnnnnnnnnnnnnnnnnnnnnnnnnnnnnnnnnnnnnnnnnnnnnnnnnnnnnnnnnnnnnnnnnnnnnnnnnnnnnnnnnnnnnnnnnnnnnnnnnnnnnnnnnnnnnnnnnnnnnnnnnnnnnnnnnnnnnnnnnnnnnnnnnnnnnnnnnnnnnnnnnnnnnnnnnnnnnnnnnnnnnnnnnnnnnnnnnnnnnnnnnnnnnnnnnnnnnnnnnnnnnnnnnnnnnnnnnnnnnnnnnnnnnnnnnnnnnnnnnnnnnnnnnnnnnnnnnnnnnnnnnnnnnnnnnnnnnnnnnnnnnnnnnnnnnnnnnnnnnnnnnnnnnnnnnnnnnnnnnnnnnnnnnnnnnnnnnnnnnnnnnnnnnnnnnnnnnnnnnnnnnnnnnnnnnnnnnnnnnnnnnnnnnnnnnnnnnnnnnnnnnnnnnnnnnnnnnnnnnnnnnnnnnnnnnnnnnnnnnnnnnnnnnnnnnnnnnnnnnnnnnnnnnnnnnnnnnnnnnnnnnnnnnnnnnnnnnnnnnnnnnnnnnnnnnnnnnnnnnnnnnnnnnnnnnnnnnnnnnnnnnnnnnnnnnnnnnnnnnnnnnnnnnnnnnnnnnnnnnnnnnnnnnnnnnnnnnnnnnnnnnnnnnnnnnnnnnnnnnnnnnnnnnnnnnnnnnnnnnnnnnnnnnnnnnnnnnnnnnnnnnnnnnnnnnnnnnnnnnnnnnnnnnnnnnnnnnnnnnnnnnnnnnnnnnnnnnnnnnnnnnnnnnnnnnnnnnnnnnnnnnnnnnnnnnnnnnnnnnnnnnnnnnnnnnnnnnnnnnnnnnnnnnnnnnnnnnnnnnnnnnnnnnnnnnnnnnnnnnnnnnnnnnnnnnnnnnnnnnnnnnnnnnnnnnnnnnnnnnnnnnnnnnnnnnnnnnnnnnnnnnnnnnnnnnnnnnnnnnnnnnnnnnnnnnnnnnnnnnnnnnnnnnnnnnnnnnnnnnnnnnnnnnnnnnnnnnnnnnnnnnnnnnnnnnnnnnnnnnnnnnnnnnnnnnnnnnnnnnnnnnnnnnnnnnnnnnnnnnnnnnnnnnnnnnnnnnnnnnnnnnnnnnnnnnnnnnnnnnnnnnnnnnnnnnnnnnnnnnnnnnnnnnnnnnnnnnnnnnnnnnnnnnnnnnnnnnnnnnnnnnnnnnnnnnnnnnnnnnnnnnnnnnnnnnnnnnnnnnnnnnnnnnnnnnnnnnnnnnnnnnnnnnnnnnnnnnnnnnnnnnnnnnnnnnnnnnnnnnnnnnnnnnnnnnnnnnnnnnnnnnnnnnnnnnnnnnnnnnnnnnnnnnnnnnnnnnnnnnnnnnnnnnnnnnnnnnnnnnnnnnnnnnnnnnnnnnnnnnnnnnnnnnnnnnnnnnnnnnnnnnnnnnnnnnnnnnnnnnnnnnnnnnnnnnnnnnnnnnnnnnnnnnnnnnnnnnnnnnnnnnnnnnnnnnnnnnnnnnnnnnnnnnnnnnnnnnnnnnnnnnnnnnnnnnnnnnnnnnnnnnnnnnnnnnnnnnnnnnnnnnnnnnnnnnnnnnnnnnnnnnnnnnnnnnnnnnnnnnnnnnnnnnnnnnnnnnnnnnnnnnnnnnnnnnnnnnnnnnnnnnnnnnnnnnnnnnnnnnnnnnnnnnnnnnnnnnnnnnnnnnnnnnnnnnnnnnnnnnnnnnnnnnnnnnnnnnnnnnnnnnnnnnnnnnnnnnnnnnnnnnnnnnnnnnnnnnnnnnnnnnnnnnnnnnnnnnnnnnnnnnnnnnnnnnnnnnnnnnnnnnnnnnnnnnnnnnnnnnnnnnnnnnnnnnnnnnnnnnnnnnnnnnnnnnnnnnnnnnnnnnnnnnnnnnnnnnnnnnnnnnnnnnnnnnnnnnnnnnnnnnnnnnnnnnnnnnnnnnnnnnnnnnnnnnnnnnnnnnnnnnnnnnnnnnnnnnnnnnnnnnnnnnnnnnnnnnnnnnnnnnnnnnnnnnnnnnnnnnnnnnnnnnnnnnnnnnnnnnnnnnnnnnnnnnnnnnnnnnnnnnnnnnnnnnnnnnnnnnnnnnnnnnnnnnnnnnnnnnnnnnnnnnnnnnnnnnnnnnnnnnnnnnnnnnnnnnnnnnnnnnnnnnnnnnnnnnnnnnnnnnnnnnnnnnnnnnnnnnnnnnnnnnnnnnnnnnnnnnnnnnnnnnnnnnnnnnnnnnnnnnnnnnnnnnnnnnnnnnnnnnnnnnnnnnnnnnnnnnnnnnnnnnnnnnnnnnnnnnnnnnnnnnnnnnnnnnnnnnnnnnnnnnnnnnnnnnnnnnnnnnnnnnnnnnnnnnnnnnnnnnnnnnnnnnnnnnnnnnnnnnnnnnnnnnnnnnnnnnnnnnnnnnnnnnnnnnnnnnnnnnnnnnnnnnnnnnnnnnnnnnnnnnnnnnnnnnnnnnnnnnnnnnnnnnnnnnnnnnnnnnnnnnnnnnnnnnnnnnnnnnnnnnnnnnnnnnnnnnnnnnnnnnnnnnnnnnnnnnnnnnnnnnnnnnnnnnnnnnnnnnnnnnnnnnnnnnnnnnnnnnnnnnnnnnnnnnnnnnnnnnnnnnnnnnnnnnnnnnnnnnnnnnnnnnnnnnnnnnnnnnnnnnnnnnnnnnnnnnnnnnnnnnnnnnnnnnnnnnnnnnnnnnnnnnnnnnnnnnnnnnnnnnnnnnnnnnnnnnnnnnnnnnnnnnnnnnnnnnnnnnnnnnnnnnnnnnnnnnnnnnnnnnnnnnnnnnnnnnnnnnnnnnnnnnnnnnnnnnnnnnnnnnnnnnnnnnnnnnnnnnnnnnnnnnnnnnnnnnnnnnnnnnnnnnnnnnnnnnnnnnnnnnnnnnnnnnnnnnnnnnnnnnnnnnnnnnnnnnnnnnnnnnnnnnnnnnnnnnnnnnnnnnnnnnnnnnnnnnnnnnnnnnnnnnnnnnnnnnnnnnnnnnnnnnnnnnnnnnnnnnnnnnnnnnnnnnnnnnnnnnnnnnnnnnnnnnnnnnnnnnnnnnnnnnnnnnnnnnnnnnnnnnnnnnnnnnnnnnnnnnnnnnnnnnnnnnnnnnnnnnnnnnnnnnnnnnnnnnnnnnnnnnnnnnnnnnnnnnnnnnnnnnnnnnnnnnnnnnnnnnnnnnnnnnnnnnnnnnnnnnnnnnnnnnnnnnnnnnnnnnnnnnnnnnnnnnnnnnnnnnnnnnnnnnnnnnnnnnnnnnnnnnnnnnnnnnnnnnnnnnnnnnnnnnnnnnnnnnnnnnnnnnnnnnnnnnnnnnnnnnnnnnnnnnnnnnnnnnnnnnnnnnnnnnnnnnnnnnnnnnnnnnnnnnnnnnnnnnnnnnnnnnnnnnnnnnnnnnnnnnnnnnnnnnnnnnnnnnnnnnnnnnnnnnnnnnnnnnnnnnnnnnnnnnnnnnnnnnnnnnnnnnnnnnnnnnnnnnnnnnnnnnnnnnnnnnnnnnnnnnnnnnnnnnnnnnnnnnnnnnnnnnnnnnnnnnnnnnnnnnnnnnnnnnnnnnnnnnnnnnnnnnnnnnnnnnnnnnnnnnnnnnnnnnnnnnnnnnnnnnnnnnnnnnnnnnnnnnnnnnnnnnnnnnnnnnnnnnnnnnnnnnnnnnnnnnnnnnnnnnnnnnnnnnnnnnnnnnnnnnnnnnnnnnnnnnnnnnnnnnnnnnnnnnnnnnnnnnnnnnnnnnnnnnnnnnnnnnnnnnnnnnnnnnnnnnnnnnnnnnnnnnnnnnnnnnnnnnnnnnnnnnnnnnnnnnnnnnnnnnnnnnnnnnnnnnnnnnnnnnnnnnnnnnnnnnnnnnnnnnnnnnnnnnnnnnnnnnnnnnnnnnnnnnnnnnnnnnnnnnnnnnnnnnnnnnnnnnnnnnnnnnnnnnnnnnnnnnnnnnnnnnnnnnnnnnnnnnnnnnnnnnnnnnnnnnnnnnnnnnnnnnnnnnnnnnnnnnnnnnnnnnnnnnnnnnnnnnnnnnnnnnnnnnnnnnnnnnnnnnnnnnnnnnnnnnnnnnnnnnnnnnnnnnnnnnnnnnnnnnnnnnnnnnnnnnnnnnnnnnnnnnnnnnnnnnnnnnnnnnnnnnnnnnnnnnnnnnnnnnnnnnnnnnnnnnnnnnnnnnnnnnnnnnnnnnnnnnnnnnnnnnnnnnnnnnnnnnnnnnnnnnnnnnnnnnnnnnnnnnnnnnnnnnnnnnnnnnnnnnnnnnnnnnnnnnnnnnnnnnnnnnnnnnnnnnnnnnnnnnnnnnnnnnnnnnnnnnnnnnnnnnnnnnnnnnnnnnnnnnnnnnnnnnnnnnnnnnnnnnnnnnnnnnnnnnnnnnnnnnnnnnnnnnnnnnnnnnnnnnnnnnnnnnnnnnnnnnnnnnnnnnnnnnnnnnnnnnnnnnnnnnnnnnnnnnnnnnnnnnnnnnnnnnnnnnnnnnnnnnnnnnnnnnnnnnnnnnnnnnnnnnnnnnnnnnnnnnnnnnnnnnnnnnnnnnnnnnnnnnnnnnnnnnnnnnnnnnnnnnnnnnnnnnnnnnnnnnnnnnnnnnnnnnnnnnnnnnnnnnnnnnnnnnnnnnnnnnnnnnnnnnnnnnnnnnnnnnnnnnnnnnnnnnnnnnnnnnnnnnnnnnnnnnnnnnnnnnnnnnnnnnnnnnnnnnnnnnnnnnnnnnnnnnnnnnnnnnnnnnnnnnnnnnnnnnnnnnnnnnnnnnnnnnnnnnnnnnnnnnnnnnnnnnnnnnnnnnnnnnnnnnnnnnnnnnnnnnnnnnnnnnnnnnnnnnnnnnnnnnnnnnnnnnnnnnnnnnnnnnnnnnnnnnnnnnnnnnnnnnnnnnnnnnnnnnnnnnnnnnnnnnnnnnnnnnnnnnnnnnnnnnnnnnnnnnnnnnnnnnnnnnnnnnnnnnnnnnnnnnnnnnnnnnnnnnnnnnnnnnnnnnnnnnnnnnnnnnnnnnnnnnnnnnnnnnnnnnnnnnnnnnnnnnnnnnnnnnnnnnnnnnnnnnnnnnnnnnnnnnnnnnnnnnnnnnnnnnnnnnnnnnnnnnnnnnnnnnnnnnnnnnnnnnnnnnnnnnnnnnnnnnnnnnnnnnnnnnnnnnnnnnnnnnnnnnnnnnnnnnnnnnnnnnnnnnnnnnnnnnnnnnnnnnnnnnnnnnnnnnnnnnnnnnnnnnnnnnnnnnnnnnnnnnnnnnnnnnnnnnnnnnnnnnnnnnnnnnnnnnnnnnnnnnnnnnnnnnnnnnnnnnnnnnnnnnnnnnnnnnnnnnnnnnnnnnnnnnnnnnnnnnnnnnnnnnnnnnnnnnnnnnnnnnnnnnnnnnnnnnnnnnnnnnnnnnnnnnnnnnnnnnnnnnnnnnnnnnnnnnnnnnnnnnnnnnnnnnnnnnnnnnnnnnnnnnnnnnnnnnnnnnnnnnnnnnnnnnnnnnnnnnnnnnnnnnnnnnnnnnnnnnnnnnnnnnnnnnnnnnnnnnnnnnnnnnnnnnnnnnnnnnnnnnnnnnnnnnnnnnnnnnnnnnnnnnnnnnnnnnnnnnnnnnnnnnnnnnnnnnnnnnnnnnnnnnnnnnnnnnnnnnnnnnnnnnnnnnnnnnnnnnnnnnnnnnnnnnnnnnnnnnnnnnnnnnnnnnnnnnnnnnnnnnnnnnnnnnnnnnnnnnnnnnnnnnnnnnnnnnnnnnnnnnnnnnnnnnnnnnnnnnnnnnnnnnnnnnnnnnnnnnnnnnnnnnnnnnnnnnnnnnnnnnnnnnnnnnnnnnnnnnnnnnnnnnnnnnnnnnnnnnnnnnnnnnnnnnnnnnnnnnnnnnnnnnnnnnnnnnnnnnnnnnnnnnnnnnnnnnnnnnnnnnnnnnnnnnnnnnnnnnnnnnnnnnnnnnnnnnnnnnnnnnnnnnnnnnnnnnnnnnnnnnnnnnnnnnnnnnnnnnnnnnnnnnnnnnnnnnnnnnnnnnnnnnnnnnnnnnnnnnnnnnnnnnnnnnnnnnnnnnnnnnnnnnnnnnnnnnnnnnnnnnnnnnnnnnnnnnnnnnnnnnnnnnnnnnnnnnnnnnnnnnnnnnnnnnnnnnnnnnnnnnnnnnnnnnnnnnnnnnnnnnnnnnnnnnnnnnnnnnnnnnnnnnnnnnnnnnnnnnnnnnnnnnnnnnnnnnnnnnnnnnnnnnnnnnnnnnnnnnnnnnnnnnnnnnnnnnnnnnnnnnnnnnnnnnnnnnnnnnnnnnnnnnnnnnnnnnnnnnnnnnnnnnnnnnnnnnnnnnnnnnnnnnnnnnnnnnnnnnnnnnnnnnnnnnnnnnnnnnnnnnnnnnnnnnnnnnnnnnnnnnnnnnnnnnnnnnnnnnnnnnnnnnnnnnnnnnnnnnnnnnnnnnnnnnnnnnnnnnnnnnnnnnnnnnnnnnnnnnnnnnnnnnnnnnnnnnnnnnnnnnnnnnnnnnnnnnnnnnnnnnnnnnnnnnnnnnnnnnnnnnnnnnnnnnnnnnnnnnnnnnnnnnnnnnnnnnnnnnnnnnnnnnnnnnnnnnnnnnnnnnnnnnnnnnnnnnnnnnnnnnnnnnnnnnnnnnnnnnnnnnnnnnnnnnnnnnnnnnnnnnnnnnnnnnnnnnnnnnnnnnnnnnnnnnnnnnnnnnnnnnnnnnnnnnnnnnnnnnnnnnnnnnnnnnnnnnnnnnnnnnnnnnnnnnnnnnnnnnnnnnnnnnnnnnnnnnnnnnnnnnnnnnnnnnnnnnnnnnnnnnnnnnnnnnnnnnnnnnnnnnnnnnnnnnnnnnnnnnnnnnnnnnnnnnnnnnnnnnnnnnnnnnnnnnnnnnnnnnnnnnnnnnnnnnnnnnnnnnnnnnnnnnnnnnnnnnnnnnnnnnnnnnnnnnnnnnnnnnnnnnnnnnnnnnnnnnnnnnnnnnnnnnnnnnnnnnnnnnnnnnnnnnnnnnnnnnnnnnnnnnnnnnnnnnnnnnnnnnnnnnnnnnnnnnnnnnnnnnnnnnnnnnnnnnnnnnnnnnnnnnnnnnnnnnnnnnnnnnnnnnnnnnnnnnnnnnnnnnnnnnnnnnnnnnnnnnnnnnnnnnnnnnnnnnnnnnnnnnnnnnnnnnnnnnnnnnnnnnnnnnnnnnnnnnnnnnnnnnnnnnnnnnnnnnnnnnnnnnnnnnnnnnnnnnnnnnnnnnnnnnnnnnnnnnnnnnnnnnnnnnnnnnnnnnnnnnnnnnnnnnnnnnnnnnnnnnnnnnnnnnnnnnnnnnnnnnnnnnnnnnnnnnnnnnnnnnnnnnnnnnnnnnnnnnnnnnnnnnnnnnnnnnnnnnnnnnnnnnnnnnnnnnnnnnnnnnnnnnnnnnnnnnnnnnnnnnnnnnnnnnnnnnnnnnnnnnnnnnnnnnnnnnnnnnnnnnnnnnnnnnnnnnnnnnnnnnnnnnnnnnnnnnnnnnnnnnnnnnnnnnnnnnnnnnnnnnnnnnnnnnnnnnnnnnnnnnnnnnnnnnnnnnnnnnnnnnnnnnnnnnnnnnnnnnnnnnnnnnnnnnnnnnnnnnnnnnnnnnnnnnnnnnnnnnnnnnnnnnnnnnnnnnnnnnnnnnnnnnnnnnnnnnnnnnnnnnnnnnnnnnnnnnnnnnnnnnnnnnnnnnnnnnnnnnnnnnnnnnnnnnnnnnnnnnnnnnnnnnnnnnnnnnnnnnnnnnnnnnnnnnnnnnnnnnnnnnnnnnnnnnnnnnnnnnnnnnnnnnnnnnnnnnnnnnnnnnnnnnnnnnnnnnnnnnnnnnnnnnnnnnnnnnnnnnnnnnnnnnnnnnnnnnnnnnnnnnnnnnnnnnnnnnnnnnnnnnnnnnnnnnnnnnnnnnnnnnnnnnnnnnnnnnnnnnnnnnnnnnnnnnnnnnnnnnnnnnnnnnnnnnnnnnnnnnnnnnnnnnnnnnnnnnnnnnnnnnnnnnnnnnnnnnnnnnnnnnnnnnnnnnnnnnnnnnnnnnnnnnnnnnnnnnnnnnnnnnnnnnnnnnnnnnnnnnnnnnnnnnnnnnnnnnnnnnnnnnnnnnnnnnnnnnnnnnnnnnnnnnnnnnnnnnnnnnnnnnnnnnnnnnnnnnnnnnnnnnnnnnnnnnnnnnnnnnnnnnnnnnnnnnnnnnnnnnnnnnnnnnnnnnnnnnnnnnnnnnnnnnnnnnnnnnnnnnnnnnnnnnnnnnnnnnnnnnnnnnnnnnnnnnnnnnnnnnnnnnnnnnnnnnnnnnnnnnnnnnnnnnnnnnnnnnnnnnnnnnnnnnnnnnnnnnnnnnnnnnnnnnnnnnnnnnnnnnnnnnnnnnnnnnnnnnnnnnnnnnnnnnnnnnnnnnnnnnnnnnnnnnnnnnnnnnnnnnnnnnnnnnnnnnnnnnnnnnnnnnnnnnnnnnnnnnnnnnnnnnnnnnnnnnnnnnnnnnnnnnnnnnnnnnnnnnnnnnnnnnnnnnnnnnnnnnnnnnnnnnnnnnnnnnnnnnnnnnnnnnnnnnnnnnnnnnnnnnnnnnnnnnnnnnnnnnnnnnnnnnnnnnnnnnnnnnnnnnnnnnnnnnnnnnnnnnnnnnnnnnnnnnnnnnnnnnnnnnnnnnnnnnnnnnnnnnnnnnnnnnnnnnnnnnnnnnnnnnnnnnnnnnnnnnnnnnnnnnnnnnnnnnnnnnnnnnnnnnnnnnnnnnnnnnnnnnnnnnnnnnnnnnnnnnnnnnnnnnnnnnnnnnnnnnnnnnnnnnnnnnnnnnnnnnnnnnnnnnnnnnnnnnnnnnnnnnnnnnnnnnnnnnnnnnnnnnnnnnnnnnnnnnnnnnnnnnnnnnnnnnnnnnnnnnnnnnnnnnnnnnnnnnnnnnnnnnnnnnnnnnnnnnnnnnnnnnnnnnnnnnnnnnnnnnnnnnnnnnnnnnnnnnnnnnnnnnnnnnnnnnnnnnnnnnnnnnnnnnnnnnnnnnnnnnnnnnnnnnnnnnnnnnnnnnnnnnnnnnnnnnnnnnnnnnnnnnnnnnnnnnnnnnnnnnnnnnnnnnnnnnnnnnnnnnnnnnnnnnnnnnnnnnnnnnnnnnnnnnnnnnnnnnnnnnnnnnnnnnnnnnnnnnnnnnnnnnnnnnnnnnnnnnnnnnnnnnnnnnnnnnnnnnnnnnnnnnnnnnnnnnnnnnnnnnnnnnnnnnnnnnnnnnnnnnnnnnnnnnnnnnnnnnnnnnnnnnnnnnnnnnnnnnnnnnnnnnnnnnnnnnnnnnnnnnnnnnnnnnnnnnnnnnnnnnnnnnnnnnnnnnnnnnnnnnnnnnnnnnnnnnnnnnnnnnnnnnnnnnnnnnnnnnnnnnnnnnnnnnnnnnnnnnnnnnnnnnnnnnnnnnnnnnnnnnnnnnnnnnnnnnnnnnnnnnnnnnnnnnnnnnnnnnnnnnnnnnnnnnnnnnnnnnnnnnnnnnnnnnnnnnnnnnnnnnnnnnnnnnnnnnnnnnnnnnnnnnnnnnnnnnnnnnnnnnnnnnnnnnnnnnnnnnnnnnnnnnnnnnnnnnnnnnnnnnnnnnnnnnnnnnnnnnnnnnnnnnnnnnnnnnnnnnnnnnnnnnnnnnnnnnnnnnnnnnnnnnnnnnnnnnnnnnnnnnnnnnnnnnnnnnnnnnnnnnnnnnnnnnnnnnnnnnnnnnnnnnnnnnnnnnnnnnnnnnnnnnnnnnnnnnnnnnnnnnnnnnnnnnnnnnnnnnnnnnnnnnnnnnnnnnnnnnnnnnnnnnnnnnnnnnnnnnnnnnnnnnnnnnnnnnnnnnnnnnnnnnnnnnnnnnnnnnnnnnnnnnnnnnnnnnnnnnnnnnnnnnnnnnnnnnnnnnnnnnnnnnnnnnnnnnnnnnnnnnnnnnnnnnnnnnnnnnnnnnnnnnnnnnnnnnnnnnnnnnnnnnnnnnnnnnnnnnnnnnnnnnnnnnnnnnnnnnnnnnnnnnnnnnnnnnnnnnnnnnnnnnnnnnnnnnnnnnnnnnnnnnnnnnnnnnnnnnnnnnnnnnnnnnnnnnnnnnnnnnnnnnnnnnnnnnnnnnnnnnnnnnnnnnnnnnnnnnnnnnnnnnnnnnnnnnnnnnnnnnnnnnnnnnnnnnnnnnnnnnnnnnnnnnnnnnnnnnnnnnnnnnnnnnnnnnnnnnnnnnnnnnnnnnnnnnnnnnnnnnnnnnnnnnnnnnnnnnnnnnnnnnnnnnnnnnnnnnnnnnnnnnnnnnnnnnnnnnnnnnnnnnnnnnnnnnnnnnnnnnnnnnnnnnnnnnnnnnnnnnnnnnnnnnnnnnnnnnnnnnnnnnnnnnnnnnnnnnnnnnnnnnnnnnnnnnnnnnnnnnnnnnnnnnnnnnnnnnnnnnnnnnnnnnnnnnnnnnnnnnnnnnnnnnnnnnnnnnnnnnnnnnnnnnnnnnnnnnnnnnnnnnnnnnnnnnnnnnnnnnnnnnnnnnnnnnnnnnnnnnnnnnnnnnnnnnnnnnnnnnnnnnnnnnnnnnnnnnnnnnnnnnnnnnnnnnnnnnnnnnnnnnnnnnnnnnnnnnnnnnnnnnnnnnnnnnnnnnnnnnnnnnnnnnnnnnnnnnnnnnnnnnnnnnnnnnnnnnnnnnnnnnnnnnnnnnnnnnnnnnnnnnnnnnnnnnnnnnnnnnnnnnnnnnnnnnnnnnnnnnnnnnnnnnnnnnnnnnnnnnnnnnnnnnnnnnnnnnnnnnnnnnnnnnnnnnnnnnnnnnnnnnnnnnnnnnnnnnnnnnnnnnnnnnnnnnnnnnnnnnnnnnnnnnnnnnnnnnnnnnnnnnnnnnnnnnnnnnnnnnnnnnnnnnnnnnnnnnnnnnnnnnnnnnnnnnnnnnnnnnnnnnnnnnnnnnnnnnnnnnnnnnnnnnnnnnnnnnnnnnnnnnnnnnnnnnnnnnnnnnnnnnnnnnnnnnnnnnnnnnnnnnnnnnnnnnnnnnnnnnnnnnnnnnnnnnnnnnnnnnnnnnnnnnnnnnnnnnnnnnnnnnnnnnnnnnnnnnnnnnnnnnnnnnnnnnnnnnnnnnnnnnnnnnnnnnnnnnnnnnnnnnnnnnnnnnnnnnnnnnnnnnnnnnnnnnnnnnnnnnnnnnnnnnnnnnnnnnnnnnnnnnnnnnnnnnnnnnnnnnnnnnnnnnnnnnnnnnnnnnnnnnnnnnnnnnnnnnnnnnnnnnnnnnnnnnnnnnnnnnnnnnnnnnnnnnnnnnnnnnnnnnnnnnnnnnnnnnnnnnnnnnnnnnnnnnnnnnnnnnnnnnnnnnnnnnnnnnnnnnnnnnnnnnnnnnnnnnnnnnnnnnnnnnnnnnnnnnnnnnnnnnnnnnnnnnnnnnnnnnnnnnnnnnnnnnnnnnnnnnnnnnnnnnnnnnnnnnnnnnnnnnnnnnnnnnnnnnnnnnnnnnnnnnnnnnnnnnnnnnnnnnnnnnnnnnnnnnnnnnnnnnnnnnnnnnnnnnnnnnnnnnnnnnnnnnnnnnnnnnnnnnnnnnnnnnnnnnnnnnnnnnnnnnnnnnnnnnnnnnnnnnnnnnnnnnnnnnnnnnnnnnnnnnnnnnnnnnnnnnnnnnnnnnnnnnnnnnnnnnnnnnnnnnnnnnnnnnnnnnnnnnnnnnnnnnnnnnnnnnnnnnnnnnnnnnnnnnnnnnnnnnnnnnnnnnnnnnnnnnnnnnnnnnnnnnnnnnnnnnnnnnnnnnnnnnnnnnnnnnnnnnnnnnnnnnnnnnnnnnnnnnnnnnnnnnnnnnnnnnnnnnnnnnnnnnnnnnnnnnnnnnnnnnnnnnnnnnnnnnnnnnnnnnnnnnnnnnnnnnnnnnnnnnnnnnnnnnnnnnnnnnnnnnnnnnnnnnnnnnnnnnnnnnnnnnnnnnnnnnnnnnnnnnnnnnnnnnnnnnnnnnnnnnnnnnnnnnnnnnnnnnnnnnnnnnnnnnnnnnnnnnnnnnnnnnnnnnnnnnnnnnnnnnnnnnnnnnnnnnnnnnnnnnnnnnnnnnnnnnnnnnnnnnnnnnnnnnnnnnnnnnnnnnnnnnnnnnnnnnnnnnnnnnnnnnnnnnnnnnnnnnnnnnnnnnnnnnnnnnnnnnnnnnnnnnnnnnnnnnnnnnnnnnnnnnnnnnnnnnnnnnnnnnnnnnnnnnnnnnnnnnnnnnnnnnnnnnnnnnnnnnnnnnnnnnnnnnnnnnnnnnnnnnnnnnnnnnnnnnnnnnnnnnnnnnnnnnnnnnnnnnnnnnnnnnnnnnnnnnnnnnnnnnnnnnnnnnnnnnnnnnnnnnnnnnnnnnnnnnnnnnnnnnnnnnnnnnnnnnnnnnnnnnnnnnnnnnnnnnnnnnnnnnnnnnnnnnnnnnnnnnnnnnnnnnnnnnnnnnnnnnnnnnnnnnnnnnnnnnnnnnnnnnnnnnnnnnnnnnnnnnnnnnnnnnnnnnnnnnnnnnnnnnnnnnnnnnnnnnnnnnnnnnnnnnnnnnnnnnnnnnnnnnnnnnnnnnnnnnnnnnnnnnnnnnnnnnnnnnnnnnnnnnnnnnnnnnnnnnnnnnnnnnnnnnnnnnnnnnnnnnnnnnnnnnnnnnnnnnnnnnnnnnnnnnnnnnnnnnnnnnnnnnnnnnnnnnnnnnnnnnnnnnnnnnnnnnnnnnnnnnnnnnnnnnnnnnnnnnnnnnnnnnnnnnnnnnnnnnnnnnnnnnnnnnnnnnnnnnnnnnnnnnnnnnnnnnnnnnnnnnnnnnnnnnnnnnnnnnnnnnnnnnnnnnnnnnnnnnnnnnnnnnnnnnnnnnnnnnnnnnnnnnnnnnnnnnnnnnnnnnnnnnnnnnnnnnnnnnnnnnnnnnnnnnnnnnnnnnnnnnnnnnnnnnnnnnnnnnnnnnnnnnnnnnnnnnnnnnnnnnnnnnnnnnnnnnnnnnnnnnnnnnnnnnnnnnnnnnnnnnnnnnnnnnnnnnnnnnnnnnnnnnnnnnnnnnnnnnnnnnnnnnnnnnnnnnnnnnnnnnnnnnnnnnnnnnnnnnnnnnnnnnnnnnnnnnnnnnnnnnnnnnnnnnnnnnnnnnnnnnnnnnnnnnnnnnnnnnnnnnnnnnnnnnnnnnnnnnnnnnnnnnnnnnnnnnnnnnnnnnnnnnnnnnnnnnnnnnnnnnnnnnnnnnnnnnnnnnnnnnnnnnnnnnnnnnnnnnnnnnnnnnnnnnnnnnnnnnnnnnnnnnnnnnnnnnnnnnnnnnnnnnnnnnnnnnnnnnnnnnnnnnnnnnnnnnnnnnnnnnnnnnnnnnnnnnnnnnnnnnnnnnnnnnnnnnnnnnnnnnnnnnnnnnnnnnnnnnnnnnnnnnnnnnnnnnnnnnnnnnnnnnnnnnnnnnnnnnnnnnnnnnnnnnnnnnnnnnnnnnnnnnnnnnnnnnnnnnnnnnnnnnnnnnnnnnnnnnnnnnnnnnnnnnnnnnnnnnnnnnnnnnnnnnnnnnnnnnnnnnnnnnnnnnnnnnnnnnnnnnnnnnnnnnnnnnnnnnnnnnnnnnnnnnnnnnnnnnnnnnnnnnnnnnnnnnnnnnnnnnnnnnnnnnnnnnnnnnnnnnnnnnnnnnnnnnnnnnnnnnnnnnnnnnnnnnnnnnnnnnnnnnnnnnnnnnnnnnnnnnnnnnnnnnnnnnnnnnnnnnnnnnnnnnnnnnnnnnnnnnnnnnnnnnnnnnnnnnnnnnnnnnnnnnnnnnnnnnnnnnnnnnnnnnnnnnnnnnnnnnnnnnnnnnnnnnnnnnnnnnnnnnnnnnnnnnnnnnnnnnnnnnnnnnnnnnnnnnnnnnnnnnnnnnnnnnnnnnnnnnnnnnnnnnnnnnnnnnnnnnnnnnnnnnnnnnnnnnnnnnnnnnnnnnnnnnnnnnnnnnnnnnnnnnnnnnnnnnnnnnnnnnnnnnnnnnnnnnnnnnnnnnnnnnnnnnnnnnnnnnnnnnnnnnnnnnnnnnnnnnnnnnnnnnnnnnnnnnnnnnnnnnnnnnnnnnnnnnnnnnnnnnnnnnnnnnnnnnnnnnnnnnnnnnnnnnnnnnnnnnnnnnnnnnnnnnnnnnnnnnnnnnnnnnnnnnnnnnnnnnnnnnnnnnnnnnnnnnnnnnnnnnnnnnnnnnnnnnnnnnnnnnnnnnnnnnnnnnnnnnnnnnnnnnnnnnnnnnnnnnnnnnnnnnnnnnnnnnnnnnnnnnnnnnnnnnnnnnnnnnnnnnnnnnnnnnnnnnnnnnnnnnnnnnnnnnnnnnnnnnnnnnnnnnnnnnnnnnnnnnnnnnnnnnnnnnnnnnnnnnnnnnnnnnnnnnnnnnnnnnnnnnnnnnnnnnnnnnnnnnnnnnnnnnnnnnnnnnnnnnnnnnnnnnnnnnnnnnnnnnnnnnnnnnnnnnnnnnnnnnnnnnnnnnnnnnnnnnnnnnnnnnnnnnnnnnnnnnnnnnnnnnnnnnnnnnnnnnnnnnnnnnnnnnnnnnnnnnnnnnnnnnnnnnnnnnnnnnnnnnnnnnnnnnnnnnnnnnnnnnnnnnnnnnnnnnnnnnnnnnnnnnnnnnnnnnnnnnnnnnnnnnnnnnnnnnnnnnnnnnnnnnnnnnnnnnnnnnnnnnnnnnnnnnnnnnnnnnnnnnnnnnnnnnnnnnnnnnnnnnnnnnnnnnnnnnnnnnnnnnnnnnnnnnnnnnnnnnnnnnnnnnnnnnnnnnnnnnnnnnnnnnnnnnnnnnnnnnnnnnnnnnnnnnnnnnnnnnnnnnnnnnnnnnnnnnnnnnnnnnnnnnnnnnnnnnnnnnnnnnnnnnnnnnnnnnnnnnnnnnnnnnnnnnnnnnnnnnnnnnnnnnnnnnnnnnnnnnnnnnnnnnnnnnnnnnnnnnnnnnnnnnnnnnnnnnnnnnnnnnnnnnnnnnnnnnnnnnnnnnnnnnnnnnnnnnnnnnnnnnnnnnnnnnnnnnnnnnnnnnnnnnnnnnnnnnnnnnnnnnnnnnnnnnnnnnnnnnnnnnnnnnnnnnnnnnnnnnnnnnnnnnnnnnnnnnnnnnnnnnnnnnnnnnnnnnnnnnnnnnnnnnnnnnnnnnnnnnnnnnnnnnnnnnnnnnnnnnnnnnnnnnnnnnnnnnnnnnnnnnnnnnnnnnnnnnnnnnnnnnnnnnnnnnnnnnnnnnnnnnnnnnnnnnnnnnnnnnnnnnnnnnnnnnnnnnnnnnnnnnnnnnnnnnnnnnnnnnnnnnnnnnnnnnnnnnnnnnnnnnnnnnnnnnnnnnnnnnnnnnnnnnnnnnnnnnnnnnnnnnnnnnnnnnnnnnnnnnnnnnnnnnnnnnnnnnnnnnnnnnnnnnnnnnnnnnnnnnnnnnnnnnnnnnnnnnnnnnnnnnnnnnnnnnnnnnnnnnnnnnnnnnnnnnnnnnnnnnnnnnnnnnnnnnnnnnnnnnnnnnnnnnnnnnnnnnnnnnnnnnnnnnnnnnnnnnnnnnnnnnnnnnnnnnnnnnnnnnnnnnnnnnnnnnnnnnnnnnnnnnnnnnnnnnnnnnnnnnnnnnnnnnnnnnnnnnnnnnnnnnnnnnnnnnnnnnnnnnnnnnnnnnnnnnnnnnnnnnnnnnnnnnnnnnnnnnnnnnnnnnnnnnnnnnnnnnnnnnnnnnnnnnnnnnnnnnnnnnnnnnnnnnnnnnnnnnnnnnnnnnnnnnnnnnnnnnnnnnnnnnnnnnnnnnnnnnnnnnnnnnnnnnnnnnnnnnnnnnnnnnnnnnnnnnnnnnnnnnnnnnnnnnnnnnnnnnnnnnnnnnnnnnnnnnnnnnnnnnnnnnnnnnnnnnnnnnnnnnnnnnnnnnnnnnnnnnnnnnnnnnnnnnnnnnnnnnnnnnnnnnnnnnnnnnnnnnnnnnnnnnnnnnnnnnnnnnnnnnnnnnnnnnnnnnnnnnnnnnnnnnnnnnnnnnnnnnnnnnnnnnnnnnnnnnnnnnnnnnnnnnnnnnnnnnnnnnnnnnnnnnnnnnnnnnnnnnnnnnnnnnnnnnnnnnnnnnnnnnnnnnnnnnnnnnnnnnnnnnnnnnnnnnnnnnnnnnnnnnnnnnnnnnnnnnnnnnnnnnnnnnnnnnnnnnnnnnnnnnnnnnnnnnnnnnnnnnnnnnnnnnnnnnnnnnnnnnnnnnnnnnnnnnnnnnnnnnnnnnnnnnnnnnnnnnnnnnnnnnnnnnnnnnnnnnnnnnnnnnnnnnnnnnnnnnnnnnnnnnnnnnnnnnnnnnnnnnnnnnnnnnnnnnnnnnnnnnnnnnnnnnnnnnnnnnnnnnnnnnnnnnnnnnnnnnnnnnnnnnnnnnnnnnnnnnnnnnnnnnnnnnnnnnnnnnnnnnnnnnnnnnnnnnnnnnnnnnnnnnnnnnnnnnnnnnnnnnnnnnnnnnnnnnnnnnnnnnnnnnnnnnnnnnnnnnnnnnnnnnnnnnnnnnnnnnnnnnnnnnnnnnnnnnnnnnnnnnnnnnnnnnnnnnnnnnnnnnnnnnnnnnnnnnnnnnnnnnnnnnnnnnnnnnnnnnnnnnnnnnnnnnnnnnnnnnnnnnnnnnnnnnnnnnnnnnnnnnnnnnnnnnnnnnnnnnnnnnnnnnnnnnnnnnnnnnnnnnnnnnnnnnnnnnnnnnnnnnnnnnnnnnnnnnnnnnnnnnnnnnnnnnnnnnnnnnnnnnnnnnnnnnnnnnnnnnnnnnnnnnnnnnnnnnnnnnnnnnnnnnnnnnnnnnnnnnnnnnnnnnnnnnnnnnnnnnnnnnnnnnnnnnnnnnnnnnnnnnnnnnnnnnnnnnnnnnnnnnnnnnnnnnnnnnnnnnnnnnnnnnnnnnnnnnnnnnnnnnnnnnnnnnnnnnnnnnnnnnnnnnnnnnnnnnnnnnnnnnnnnnnnnnnnnnnnnnnnnnnnnnnnnnnnnnnnnnnnnnnnnnnnnnnnnnnnnnnnnnnnnnnnnnnnnnnnnnnnnnnnnnnnnnnnnnnnnnnnnnnnnnnnnnnnnnnnnnnnnnnnnnnnnnnnnnnnnnnnnnnnnnnnnnnnnnnnnnnnnnnnnnnnnnnnnnnnnnnnnnnnnnnnnnnnnnnnnnnnnnnnnnnnnnnnnnnnnnnnnnnnnnnnnnnnnnnnnnnnnnnnnnnnnnnnnnnnnnnnnnnnnnnnnnnnnnnnnnnnnnnnnnnnnnnnnnnnnnnnnnnnnnnnnnnnnnnnnnnnnnnnnnnnnnnnnnnnnnnnnnnnnnnnnnnnnnnnnnnnnnnnnnnnnnnnnnnnnnnnnnnnnnnnnnnnnnnnnnnnnnnnnnnnnnnnnnnnnnnnnnnnnnnnnnnnnnnnnnnnnnnnnnnnnnnnnnnnnnnnnnnnnnnnnnnnnnnnnnnnnnnnnnnnnnnnnnnnnnnnnnnnnnnnnnnnnnnnnnnnnnnnnnnnnnnnnnnnnnnnnnnnnnnnnnnnnnnnnnnnnnnnnnnnnnnnnnnnnnnnnnnnnnnnnnnnnnnnnnnnnnnnnnnnnnnnnnnnnnnnnnnnnnnnnnnnnnnnnnnnnnnnnnnnnnnnnnnnnnnnnnnnnnnnnnnnnnnnnnnnnnnnnnnnnnnnnnnnnnnnnnnnnnnnnnnnnnnnnnnnnnnnnnnnnnnnnnnnnnnnnnnnnnnnnnnnnnnnnnnnnnnnnnnnnnnnnnnnnnnnnnnnnnnnnnnnnnnnnnnnnnnnnnnnnnnnnnnnnnnnnnnnnnnnnnnnnnnnnnnnnnnnnnnnnnnnnnnnnnnnnnnnnnnnnnnnnnnnnnnnnnnnnnnnnnnnnnnnnnnnnnnnnnnnnnnnnnnnnnnnnnnnnnnnnnnnnnnnnnnnnnnnnnnnnnnnnnnnnnnnnnnnnnnnnnnnnnnnnnnnnnnnnnnnnnnnnnnnnnnnnnnnnnnnnnnnnnnnnnnnnnnnnnnnnnnnnnnnnnnnnnnnnnnnnnnnnnnnnnnnnnnnnnnnnnnnnnnnnnnnnnnnnnnnnnnnnnnnnnnnnnnnnnnnnnnnnnnnnnnnnnnnnnnnnnnnnnnnnnnnnnnnnnnnnnnnnnnnnnnnnnnnnnnnnnnnnnnnnnnnnnnnnnnnnnnnnnnnnnnnnnnnnnnnnnnnnnnnnnnnnnnnnnnnnnnnnnnnnnnnnnnnnnnnnnnnnnnnnnnnnnnnnnnnnnnnnnnnnnnnnnnnnnnnnnnnnnnnnnnnnnnnnnnnnnnnnnnnnnnnnnnnnnnnnnnnnnnnnnnnnnnnnnnnnnnnnnnnnnnnnnnnnnnnnnnnnnnnnnnnnnnnnnnnnnnnnnnnnnnnnnnnnnnnnnnnnnnnnnnnnnnnnnnnnnnnnnnnnnnnnnnnnnnnnnnnnnnnnnnnnnnnnnnnnnnnnnnnnnnnnnnnnnnnnnnnnnnnnnnnnnnnnnnnnnnnnnnnnnnnnnnnnnnnnnnnnnnnnnnnnnnnnnnnnnnnnnnnnnnnnnnnnnnnnnnnnnnnnnnnnnnnnnnnnnnnnnnnnnnnnnnnnnnnnnnnnnnnnnnnnnnnnnnnnnnnnnnnnnnnnnnnnnnnnnnnnnnnnnnnnnnnnnnnnnnnnnnnnnnnnnnnnnnnnnnnnnnnnnnnnnnnnnnnnnnnnnnnnnnnnnnnnnnnnnnnnnnnnnnnnnnnnnnnnnnnnnnnnnnnnnnnnnnnnnnnnnnnnnnnnnnnnnnnnnnnnnnnnnnnnnnnnnnnnnnnnnnnnnnnnnnnnnnnnnnnnnnnnnnnnnnnnnnnnnnnnnnnnnnnnnnnnnnnnnnnnnnnnnnnnnnnnnnnnnnnnnnnnnnnnnnnnnnnnnnnnnnnnnnnnnnnnnnnnnnnnnnnnnnnnnnnnnnnnnnnnnnnnnnnnnnnnnnnnnnnnnnnnnnnnnnnnnnnnnnnnnnnnnnnnnnnnnnnnnnnnnnnnnnnnnnnnnnnnnnnnnnnnnnnnnnnnnnnnnnnnnnnnnnnnnnnnnnnnnnnnnnnnnnnnnnnnnnnnnnnnnnnnnnnnnnnnnnnnnnnnnnnnnnnnnnnnnnnnnnnnnnnnnnnnnnnnnnnnnnnnnnnnnnnnnnnnnnnnnnnnnnnnnnnnnnnnnnnnnnnnnnnnnnnnnnnnnnnnnnnnnnnnnnnnnnnnnnnnnnnnnnnnnnnnnnnnnnnnnnnnnnnnnnnnnnnnnnnnnnnnnnnnnnnnnnnnnnnnnnnnnnnnnnnnnnnnnnnnnnnnnnnnnnnnnnnnnnnnnnnnnnnnnnnnnnnnnnnnnnnnnnnnnnnnnnnnnnnnnnnnnnnnnnnnnnnnnnnnnnnnnnnnnnnnnnnnnnnnnnnnnnnnnnnnnnnnnnnnnnnnnnnnnnnnnnnnnnnnnnnnnnnnnnnnnnnnnnnnnnnnnnnnnnnnnnnnnnnnnnnnnnnnnnnnnnnnnnnnnnnnnnnnnnnnnnnnnnnnnnnnnnnnnnnnnnnnnnnnnnnnnnnnnnnnnnnnnnnnnnnnnnnnnnnnnnnnnnnnnnnnnnnnnnnnnnnnnnnnnnnnnnnnnnnnnnnnnnnnnnnnnnnnnnnnnnnnnnnnnnnnnnnnnnnnnnnnnnnnnnnnnnnnnnnnnnnnnnnnnnnnnnnnnnnnnnnnnnnnnnnnnnnnnnnnnnnnnnnnnnnnnnnnnnnnnnnnnnnnnnnnnnnnnnnnnnnnnnnnnnnnnnnnnnnnnnnnnnnnnnnnnnnnnnnnnnnnnnnnnnnnnnnnnnnnnnnnnnnnnnnnnnnnnnnnnnnnnnnnnnnnnnnnnnnnnnnnnnnnnnnnnnnnnnnnnnnnnnnnnnnnnnnnnnnnnnnnnnnnnnnnnnnnnnnnnnnnnnnnnnnnnnnnnnnnnnnnnnnnnnnnnnnnnnnnnnnnnnnnnnnnnnnnnnnnnnnnnnnnnnnnnnnnnnnnnnnnnnnnnnnnnnnnnnnnnnnnnnnnnnnnnnnnnnnnnnnnnnnnnnnnnnnnnnnnnnnnnnnnnnnnnnnnnnnnnnnnnnnnnnnnnnnnnnnnnnnnnnnnnnnnnnnnnnnnnnnnnnnnnnnnnnnnnnnnnnnnnnnnnnnnnnnnnnnnnnnnnnnnnnnnnnnnnnnnnnnnnnnnnnnnnnnnnnnnnnnnnnnnnnnnnnnnnnnnnnnnnnnnnnnnnnnnnnnnnnnnnnnnnnnnnnnnnnnnnnnnnnnnnnnnnnnnnnnnnnnnnnnnnnnnnnnnnnnnnnnnnnnnnnnnnnnnnnnnnnnnnnnnnnnnnnnnnnnnnnnnnnnnnnnnnnnnnnnnnnnnnnnnnnnnnnnnnnnnnnnnnnnnnnnnnnnnnnnnnnnnnnnnnnnnnnnnnnnnnnnnnnnnnnnnnnnnnnnnnnnnnnnnnnnnnnnnnnnnnnnnnnnnnnnnnnnnnnnnnnnnnnnnnnnnnnnnnnnnnnnnnnnnnnnnnnnnnnnnnnnnnnnnnnnnnnnnnnnnnnnnnnnnnnnnnnnnnnnnnnnnnnnnnnnnnnnnnnnnnnnnnnnnnnnnnnnnnnnnnnnnnnnnnnnnnnnnnnnnnnnnnnnnnnnnnnnnnnnnnnnnnnnnnnnnnnnnnnnnnnnnnnnnnnnnnnnnnnnnnnnnnnnnnnnnnnnnnnnnnnnnnnnnnnnnnnnnnnnnnnnnnnnnnnnnnnnnnnnnnnnnnnnnnnnnnnnnnnnnnnnnnnnnnnnnnnnnnnnnnnnnnnnnnnnnnnnnnnnnnnnnnnnnnnnnnnnnnnnnnnnnnnnnnnnnnnnnnnnnnnnnnnnnnnnnnnnnnnnnnnnnnnnnnnnnnnnnnnnnnnnnnnnnnnnnnnnnnnnnnnnnnnnnnnnnnnnnnnnnnnnnnnnnnnnnnnnnnnnnnnnnnnnnnnnnnnnnnnnnnnnnnnnnnnnnnnnnnnnnnnnnnnnnnnnnnnnnnnnnnnnnnnnnnnnnnnnnnnnnnnnnnnnnnnnnnnnnnnnnnnnnnnnnnnnnnnnnnnnnnnnnnnnnnnnnnnnnnnnnnnnnnnnnnnnnnnnnnnnnnnnnnnnnnnnnnnnnnnnnnnnnnnnnnnnnnnnnnnnnnnnnnnnnnnnnnnnnnnnnnnnnnnnnnnnnnnnnnnnnnnnnnnnnnnnnnnnnnnnnnnnnnnnnnnnnnnnnnnnnnnnnnnnnnnnnnnnnnnnnnnnnnnnnnnnnnnnnnnnnnnnnnnnnnnnnnnnnnnnnnnnnnnnnnnnnnnnnnnnnnnnnnnnnnnnnnnnnnnnnnnnnnnnnnnnnnnnnnnnnnnnnnnnnnnnnnnnnnnnnnnnnnnnnnnnnnnnnnnnnnnnnnnnnnnnnnnnnnnnnnnnnnnnnnnnnnnnnnnnnnnnnnnnnnnnnnnnnnnnnnnnnnnnnnnnnnnnnnnnnnnnnnnnnnnnnnnnnnnnnnnnnnnnnnnnnnnnnnnnnnnnnnnnnnnnnnnnnnnnnnnnnnnnnnnnnnnnnnnnnnnnnnnnnnnnnnnnnnnnnnnnnnnnnnnnnnnnnnnnnnnnnnnnnnnnnnnnnnnnnnnnnnnnnnnnnnnnnnnnnnnnnnnnnnnnnnnnnnnnnnnnnnnnnnnnnnnnnnnnnnnnnnnnnnnnnnnnnnnnnnnnnnnnnnnnnnnnnnnnnnnnnnnnnnnnnnnnnnnnnnnnnnnnnnnnnnnnnnnnnnnnnnnnnnnnnnnnnnnnnnnnnnnnnnnnnnnnnnnnnnnnnnnnnnnnnnnnnnnnnnnnnnnnnnnnnnnnnnnnnnnnnnnnnnnnnnnnnnnnnnnnnnnnnnnnnnnnnnnnnnnnnnnnnnnnnnnnnnnnnnnnnnnnnnnnnnnnnnnnnnnnnnnnnnnnnnnnnnnnnnnnnnnnnnnnnnnnnnnnnnnnnnnnnnnnnnnnnnnnnnnnnnnnnnnnnnnnnnnnnnnnnnnnnnnnnnnnnnnnnnnnnnnnnnnnnnnnnnnnnnnnnnnnnnnnnnnnnnnnnnnnnnnnnnnnnnnnnnnnnnnnnnnnnnnnnnnnnnnnnnnnnnnnnnnnnnnnnnnnnnnnnnnnnnnnnnnnnnnnnnnnnnnnnnnnnnnnnnnnnnnnnnnnnnnnnnnnnnnnnnnnnnnnnnnnnnnnnnnnnnnnnnnnnnnnnnnnnnnnnnnnnnnnnnnnnnnnnnnnnnnnnnnnnnnnnnnnnnnnnnnnnnnnnnnnnnnnnnnnnnnnnnnnnnnnnnnnnnnnnnnnnnnnnnnnnnnnnnnnnnnnnnnnnnnnnnnnnnnnnnnnnnnnnnnnnnnnnnnnnnnnnnnnnnnnnnnnnnnnnnnnnnnnnnnnnnnnnnnnnnnnnnnnnnnnnnnnnnnnnnnnnnnnnnnnnnnnnnnnnnnnnnnnnnnnnnnnnnnnnnnnnnnnnnnnnnnnnnnnnnnnnnnnnnnnnnnnnnnnnnnnnnnnnnnnnnnnnnnnnnnnnnnnnnnnnnnnnnnnnnnnnnnnnnnnnnnnnnnnnnnnnnnnnnnnnnnnnnnnnnnnnnnnnnnnnnnnnnnnnnnnnnnnnnnnnnnnnnnnnnnnnnnnnnnnnnnnnnnnnnnnnnnnnnnnnnnnnnnnnnnnnnnnnnnnnnnnnnnnnnnnnnnnnnnnnnnnnnnnnnnnnnnnnnnnnnnnnnnnnnnnnnnnnnnnnnnnnnnnnnnnnnnnnnnnnnnnnnnnnnnnnnnnnnnnnnnnnnnnnnnnnnnnnnnnnnnnnnnnnnnnnnnnnnnnnnnnnnnnnnnnnnnnnnnnnnnnnnnnnnnnnnnnnnnnnnnnnnnnnnnnnnnnnnnnnnnnnnnnnnnnnnnnnnnnnnnnnnnnnnnnnnnnnnnnnnnnnnnnnnnnnnnnnnnnnnnnnnnnnnnnnnnnnnnnnnnnnnnnnnnnnnnnnnnnnnnnnnnnnnnnnnnnnnnnnnnnnnnnnnnnnnnnnnnnnnnnnnnnnnnnnnnnnnnnnnnnnnnnnnnnnnnnnnnnnnnnnnnnnnnnnnnnnnnnnnnnnnnnnnnnnnnnnnnnnnnnnnnnnnnnnnnnnnnnnnnnnnnnnnnnnnnnnnnnnnnnnnnnnnnnnnnnnnnnnnnnnnnnnnnnnnnnnnnnnnnnnnnnnnnnnnnnnnnnnnnnnnnnnnnnnnnnnnnnnnnnnnnnnnnnnnnnnnnnnnnnnnnnnnnnnnnnnnnnnnnnnnnnnnnnnnnnnnnnnnnnnnnnnnnnnnnnnnnnnnnnnnnnnnnnnnnnnnnnnnnnnnnnnnnnnnnnnnnnnnnnnnnnnnnnnnnnnnnnnnnnnnnnnnnnnnnnnnnnnnnnnnnnnnnnnnnnnnnnnnnnnnnnnnnnnnnnnnnnnnnnnnnnnnnnnnnnnnnnnnnnnnnnnnnnnnnnnnnnnnnnnnnnnnnnnnnnnnnnnnnnnnnnnnnnnnnnnnnnnnnnnnnnnnnnnnnnnnnnnnnnnnnnnnnnnnnnnnnnnnnnnnnnnnnnnnnnnnnnnnnnnnnnnnnnnnnnnnnnnnnnnnnnnnnnnnnnnnnnnnnnnnnnnnnnnnnnnnnnnnnnnnnnnnnnnnnnnnnnnnnnnnnnnnnnnnnnnnnnnnnnnnnnnnnnnnnnnnnnnnnnnnnnnnnnnnnnnnnnnnnnnnnnnnnnnnnnnnnnnnnnnnnnnnnnnnnnnnnnnnnnnnnnnnnnnnnnnnnnnnnnnnnnnnnnnnnnnnnnnnnnnnnnnnnnnnnnnnnnnnnnnnnnnnnnnnnnnnnnnnnnnnnnnnnnnnnnnnnnnnnnnnnnnnnnnnnnnnnnnnnnnnnnnnnnnnnnnnnnnnnnnnnnnnnnnnnnnnnnnnnnnnnnnnnnnnnnnnnnnnnnnnnnnnnnnnnnnnnnnnnnnnnnnnnnnnnnnnnnnnnnnnnnnnnnnnnnnnnnnnnnnnnnnnnnnnnnnnnnnnnnnnnnnnnnnnnnnnnnnnnnnnnnnnnnnnnnnnnnnnnnnnnnnnnnnnnnnnnnnnnnnnnnnnnnnnnnnnnnnnnnnnnnnnnnnnnnnnnnnnnnnnnnnnnnnnnnnnnnnnnnnnnnnnnnnnnnnnnnnnnnnnnnnnnnnnnnnnnnnnnnnnnnnnnnnnnnnnnnnnnnnnnnnnnnnnnnnnnnnnnnnnnnnnnnnnnnnnnnnnnnnnnnnnnnnnnnnnnnnnnnnnnnnnnnnnnnnnnnnnnnnnnnnnnnnnnnnnnnnnnnnnnnnnnnnnnnnnnnnnnnnnnnnnnnnnnnnnnnnnnnnnnnnnnnnnnnnnnnnnnnnnnnnnnnnnnnnnnnnnnnnnnnnnnnnnnnnnnnnnnnnnnnnnnnnnnnnnnnnnnnnnnnnnnnnnnnnnnnnnnnnnnnnnnnnnnnnnnnnnnnnnnnnnnnnnnnnnnnnnnnnnnnnnnnnnnnnnnnnnnnnnnnnnnnnnnnnnnnnnnnnnnnnnnnnnnnnnnnnnnnnnnnnnnnnnnnnnnnnnnnnnnnnnnnnnnnnnnnnnnnnnnnnnnnnnnnnnnnnnnnnnnnnnnnnnnnnnnnnnnnnnnnnnnnnnnnnnnnnnnnnnnnnnnnnnnnnnnnnnnnnnnnnnnnnnnnnnnnnnnnnnnnnnnnnnnnnnnnnnnnnnnnnnnnnnnnnnnnnnnnnnnnnnnnnnnnnnnnnnnnnnnnnnnnnnnnnnnnnnnnnnnnnnnnnnnnnnnnnnnnnnnnnnnnnnnnnnnnnnnnnnnnnnnnnnnnnnnnnnnnnnnnnnnnnnnnnnnnnnnnnnnnnnnnnnnnnnnnnnnnnnnnnnnnnnnnnnnnnnnnnnnnnnnnnnnnnnnnnnnnnnnnnnnnnnnnnnnnnnnnnnnnnnnnnnnnnnnnnnnnnnnnnnnnnnnnnnnnnnnnnnnnnnnnnnnnnnnnnnnnnnnnnnnnnnnnnnnnnnnnnnnnnnnnnnnnnnnnnnnnnnnnnnnnnnnnnnnnnnnnnnnnnnnnnnnnnnnnnnnnnnnnnnnnnnnnnnnnnnnnnnnnnnnnnnnnnnnnnnnnnnnnnnnnnnnnnnnnnnnnnnnnnnnnnnnnnnnnnnnnnnnnnnnnnnnnnnnnnnnnnnnnnnnnnnnnnnnnnnnnnnnnnnnnnnnnnnnnnnnnnnnnnnnnnnnnnnnnnnnnnnnnnnnnnnnnnnnnnnnnnnnnnnnnnnnnnnnnnnnnnnnnnnnnnnnnnnnnnnnnnnnnnnnnnnnnnnnnnnnnnnnnnnnnnnnnnnnnnnnnnnnnnnnnnnnnnnnnnnnnnnnnnnnnnnnnnnnnnnnnnnnnnnnnnnnnnnnnnnnnnnnnnnnnnnnnnnnnnnnnnnnnnnnnnnnnnnnnnnnnnnnnnnnnnnnnnnnnnnnnnnnnnnnnnnnnnnnnnnnnnnnnnnnnnnnnnnnnnnnnnnnnnnnnnnnnnnnnnnnnnnnnnnnnnnnnnnnnnnnnnnnnnnnnnnnnnnnnnnnnnnnnnnnnnnnnnnnnnnnnnnnnnnnnnnnnnnnnnnnnnnnnnnnnnnnnnnnnnnnnnnnnnnnnnnnnnnnnnnnnnnnnnnnnnnnnnnnnnnnnnnnnnnnnnnnnnnnnnnnnnnnnnnnnnnnnnnnnnnnnnnnnnnnnnnnnnnnnnnnnnnnnnnnnnnnnnnnnnnnnnnnnnnnnnnnnnnnnnnnnnnnnnnnnnnnnnnnnnnnnnnnnnnnnnnnnnnnnnnnnnnnnnnnnnnnnnnnnnnnnnnnnnnnnnnnnnnnnnnnnnnnnnnnnnnnnnnnnnnnnnnnnnnnnnnnnnnnnnnnnnnnnnnnnnnnnnnnnnnnnnnnnnnnnnnnnnnnnnnnnnnnnnnnnnnnnnnnnnnnnnnnnnnnnnnnnnnnnnnnnnnnnnnnnnnnnnnnnnnnnnnnnnnnnnnnnnnnnnnnnnnnnnnnnnnnnnnnnnnnnnnnnnnnnnnnnnnnnnnnnnnnnnnnnnnnnnnnnnnnnnnnnnnnnnnnnnnnnnnnnnnnnnnnnnnnnnnnnnnnnnnnnnnnnnnnnnnnnnnnnnnnnnnnnnnnnnnnnnnnnnnnnnnnnnnnnnnnnnnnnnnnnnnnnnnnnnnnnnnnnnnnnnnnnnnnnnnnnnnnnnnnnnnnnnnnnnnnnnnnnnnnnnnnnnnnnnnnnnnnnnnnnnnnnnnnnnnnnnnnnnnnnnnnnnnnnnnnnnnnnnnnnnnnnnnnnnnnnnnnnnnnnnnnnnnnnnnnnnnnnnnnnnnnnnnnnnnnnnnnnnnnnnnnnnnnnnnnnnnnnnnnnnnnnnnnnnnnnnnnnnnnnnnnnnnnnnnnnnnnnnnnnnnnnnnnnnnnnnnnnnnnnnnnnnnnnnnnnnnnnnnnnnnnnnnnnnnnnnnnnnnnnnnnnnnnnnnnnnnnnnnnnnnnnnnnnnnnnnnnnnnnnnnnnnnnnnnnnnnnnnnnnnnnnnnnnnnnnnnnnnnnnnnnnnnnnnnnnnnnnnnnnnnnnnnnnnnnnnnnnnnnnnnnnnnnnnnnnnnnnnnnnnnnnnnnnnnnnnnnnnnnnnnnnnnnnnnnnnnnnnnnnnnnnnnnnnnnnnnnnnnnnnnnnnnnnnnnnnnnnnnnnnnnnnnnnnnnnnnnnnnnnnnnnnnnnnnnnnnnnnnnnnnnnnnnnnnnnnnnnnnnnnnnnnnnnnnnnnnnnnnnnnnnnnnnnnnnnnnnnnnnnnnnnnnnnnnnnnnnnnnnnnnnnnnnnnnnnnnnnnnnnnnnnnnnnnnnnnnnnnnnnnnnnnnnnnnnnnnnnnnnnnnnnnnnnnnnnnnnnnnnnnnnnnnnnnnnnnnnnnnnnnnnnnnnnnnnnnnnnnnnnnnnnnnnnnnnnnnnnnnnnnnnnnnnnnnnnnnnnnnnnnnnnnnnnnnnnnnnnnnnnnnnnnnnnnnnnnnnnnnnnnnnnnnnnnnnnnnnnnnnnnnnnnnnnnnnnnnnnnnnnnnnnnnnnnnnnnnnnnnnnnnnnnnnnnnnnnnnnnnnnnnnnnnnnnnnnnnnnnnnnnnnnnnnnnnnnnnnnnnnnnnnnnnnnnnnnnnnnnnnnnnnnnnnnnnnnnnnnnnnnnnnnnnnnnnnnnnnnnnnnnnnnnnnnnnnnnnnnnnnnnnnnnnnnnnnnnnnnnnnnnnnnnnnnnnnnnnnnnnnnnnnnnnnnnnnnnnnnnnnnnnnnnnnnnnnnnnnnnnnnnnnnnnnnnnnnnnnnnnnnnnnnnnnnnnnnnnnnnnnnnnnnnnnnnnnnnnnnnnnnnnnnnnnnnnnnnnnnnnnnnnnnnnnnnnnnnnnnnnnnnnnnnnnnnnnnnnnnnnnnnnnnnnnnnnnnnnnnnnnnnnnnnnnnnnnnnnnnnnnnnnnnnnnnnnnnnnnnnnnnnnnnnnnnnnnnnnnnnnnnnnnnnnnnnnnnnnnnnnnnnnnnnnnnnnnnnnnnnnnnnnnnnnnnnnnnnnnnnnnnnnnnnnnnnnnnnnnnnnnnnnnnnnnnnnnnnnnnnnnnnnnnnnnnnnnnnnnnnnnnnnnnnnnnnnnnnnnnnnnnnnnnnnnnnnnnnnnnnnnnnnnnnnnnnnnnnnnnnnnnnnnnnnnnnnnnnnnnnnnnnnnnnnnnnnnnnnnnnnnnnnnnnnnnnnnnnnnnnnnnnnnnnnnnnnnnnnnnnnnnnnnnnnnnnnnnnnnnnnnnnnnnnnnnnnnnnnnnnnnnnnnnnnnnnnnnnnnnnnnnnnnnnnnnnnnnnnnnnnnnnnnnnnnnnnnnnnnnnnnnnnnnnnnnnnnnnnnnnnnnnnnnnnnnnnnnnnnnnnnnnnnnnnnnnnnnnnnnnnnnnnnnnnnnnnnnnnnnnnnnnnnnnnnnnnnnnnnnnnnnnnnnnnnnnnnnnnnnnnnnnnnnnnnnnnnnnnnnnnnnnnnnnnnnnnnnnnnnnnnnnnnnnnnnnnnnnnnnnnnnnnnnnnnnnnnnnnnnnnnnnnnnnnnnnnnnnnnnnnnnnnnnnnnnnnnnnnnnnnnnnnnnnnnnnnnnnnnnnnnnnnnnnnnnnnnnnnnnnnnnnnnnnnnnnnnnnnnnnnnnnnnnnnnnnnnnnnnnnnnnnnnnnnnnnnnnnnnnnnnnnnnnnnnnnnnnnnnnnnnnnnnnnnnnnnnnnnnnnnnnnnnnnnnnnnnnnnnnnnnnnnnnnnnnnnnnnnnnnnnnnnnnnnnnnnnnnnnnnnnnnnnnnnnnnnnnnnnnnnnnnnnnnnnnnnnnnnnnnnnnnnnnnnnnnnnnnnnnnnnnnnnnnnnnnnnnnnnnnnnnnnnnnnnnnnnnnnnnnnnnnnnnnnnnnnnnnnnnnnnnnnnnnnnnnnnnnnnnnnnnnnnnnnnnnnnnnnnnnnnnnnnnnnnnnnnnnnnnnnnnnnnnnnnnnnnnnnnnnnnnnnnnnnnnnnnnnnnnnnnnnnnnnnnnnnnnnnnnnnnnnnnnnnnnnnnnnnnnnnnnnnnnnnnnnnnnnnnnnnnnnnnnnnnnnnnnnnnnnnnnnnnnnnnnnnnnnnnnnnnnnnnnnnnnnnnnnnnnnnnnnnnnnnnnnnnnnnnnnnnnnnnnnnnnnnnnnnnnnnnnnnnnnnnnnnnnnnnnnnnnnnnnnnnnnnnnnnnnnnnnnnnnnnnnnnnnnnnnnnnnnnnnnnnnnnnnnnnnnnnnnnnnnnnnnnnnnnnnnnnnnnnnnnnnnnnnnnnnnnnnnnnnnnnnnnnnnnnnnnnnnnnnnnnnnnnnnnnnnnnnnnnnnnnnnnnnnnnnnnnnnnnnnnnnnnnnnnnnnnnnnnnnnnnnnnnnnnnnnnnnnnnnnnnnnnnnnnnnnnnnnnnnnnnnnnnnnnnnnnnnnnnnnnnnnnnnnnnnnnnnnnnnnnnnnnnnnnnnnnnnnnnnnnnnnnnnnnnnnnnnnnnnnnnnnnnnnnnnnnnnnnnnnnnnnnnnnnnnnnnnnnnnnnnnnnnnnnnnnnnnnnnnnnnnnnnnnnnnnnnnnnnnnnnnnnnnnnnnnnnnnnnnnnnnnnnnnnnnnnnnnnnnnnnnnnnnnnnnnnnnnnnnnnnnnnnnnnnnnnnnnnnnnnnnnnnnnnnnnnnnnnnnnnnnnnnnnnnnnnnnnnnnnnnnnnnnnnnnnnnnnnnnnnnnnnnnnnnnnnnnnnnnnnnnnnnnnnnnnnnnnnnnnnnnnnnnnnnnnnnnnnnnnnnnnnnnnnnnnnnnnnnnnnnnnnnnnnnnnnnnnnnnnnnnnnnnnnnnnnnnnnnnnnnnnnnnnnnnnnnnnnnnnnnnnnnnnnnnnnnnnnnnnnnnnnnnnnnnnnnnnnnnnnnnnnnnnnnnnnnnnnnnnnnnnnnnnnnnnnnnnnnnnnnnnnnnnnnnnnnnnnnnnnnnnnnnnnnnnnnnnnnnnnnnnnnnnnnnnnnnnnnnnnnnnnnnnnnnnnnnnnnnnnnnnnnnnnnnnnnnnnnnnnnnnnnnnnnnnnnnnnnnnnnnnnnnnnnnnnnnnnnnnnnnnnnnnnnnnnnnnnnnnnnnnnnnnnnnnnnnnnnnnnnnnnnnnnnnnnnnnnnnnnnnnnnnnnnnnnnnnnnnnnnnnnnnnnnnnnnnnnnnnnnnnnnnnnnnnnnnnnnnnnnnnnnnnnnnnnnnnnnnnnnnnnnnnnnnnnnnnnnnnnnnnnnnnnnnnnnnnnnnnnnnnnnnnnnnnnnnnnnnnnnnnnnnnnnnnnnnnnnnnnnnnnnnnnnnnnnnnnnnnnnnnnnnnnnnnnnnnnnnnnnnnnnnnnnnnnnnnnnnnnnnnnnnnnnnnnnnnnnnnnnnnnnnnnnnnnnnnnnnnnnnnnnnnnnnnnnnnnnnnnnnnnnnnnnnnnnnnnnnnnnnnnnnnnnnnnnnnnnnnnnnnnnnnnnnnnnnnnnnnnnnnnnnnnnnnnnnnnnnnnnnnnnnnnnnnnnnnnnnnnnnnnnnnnnnnnnnnnnnnnnnnnnnnnnnnnnnnnnnnnnnnnnnnnnnnnnnnnnnnnnnnnnnnnnnnnnnnnnnnnnnnnnnnnnnnnnnnnnnnnnnnnnnnnnnnnnnnnnnnnnnnnnnnnnnnnnnnnnnnnnnnnnnnnnnnnnnnnnnnnnnnnnnnnnnnnnnnnnnnnnnnnnnnnnnnnnnnnnnnnnnnnnnnnnnnnnnnnnnnnnnnnnnnnnnnnnnnnnnnnnnnnnnnnnnnnnnnnnnnnnnnnnnnnnnnnnnnnnnnnnnnnnnnnnnnnnnnnnnnnnnnnnnnnnnnnnnnnnnnnnnnnnnnnnnnnnnnnnnnnnnnnnnnnnnnnnnnnnnnnnnnnnnnnnnnnnnnnnnnnnnnnnnnnnnnnnnnnnnnnnnnnnnnnnnnnnnnnnnnnnnnnnnnnnnnnnnnnnnnnnnnnnnnnnnnnnnnnnnnnnnnnnnnnnnnnnnnnnnnnnnnnnnnnnnnnnnnnnnnnnnnnnnnnnnnnnnnnnnnnnnnnnnnnnnnnnnnnnnnnnnnnnnnnnnnnnnnnnnnnnnnnnnnnnnnnnnnnnnnnnnnnnnnnnnnnnnnnnnnnnnnnnnnnnnnnnnnnnnnnnnnnnnnnnnnnnnnnnnnnnnnnnnnnnnnnnnnnnnnnnnnnnnnnnnnnnnnnnnnnnnnnnnnnnnnnnnnnnnnnnnnnnnnnnnnnnnnnnnnnnnnnnnnnnnnnnnnnnnnnnnnnnnnnnnnnnnnnnnnnnnnnnnnnnnnnnnnnnnnnnnnnnnnnnnnnnnnnnnnnnnnnnnnnnnnnnnnnnnnnnnnnnnnnnnnnnnnnnnnnnnnnnnnnnnnnnnnnnnnnnnnnnnnnnnnnnnnnnnnnnnnnnnnnnnnnnnnnnnnnnnnnnnnnnnnnnnnnnnnnnnnnnnnnnnnnnnnnnnnnnnnnnnnnnnnnnnnnnnnnnnnnnnnnnnnnnnnnnnnnnnnnnnnnnnnnnnnnnnnnnnnnnnnnnnnnnnnnnnnnnnnnnnnnnnnnnnnnnnnnnnnnnnnnnnnnnnnnnnnnnnnnnnnnnnnnnnnnnnnnnnnnnnnnnnnnnnnnnnnnnnnnnnnnnnnnnnnnnnnnnnnnnnnnnnnnnnnnnnnnnnnnnnnnnnnnnnnnnnnnnnnnnnnnnnnnnnnnnnnnnnnnnnnnnnnnnnnnnnnnnnnnnnnnnnnnnnnnnnnnnnnnnnnnnnnnnnnnnnnnnnnnnnnnnnnnnnnnnnnnnnnnnnnnnnnnnnnnnnnnnnnnnnnnnnnnnnnnnnnnnnnnnnnnnnnnnnnnnnnnnnnnnnnnnnnnnnnnnnnnnnnnnnnnnnnnnnnnnnnnnnnnnnnnnnnnnnnnnnnnnnnnnnnnnnnnnnnnnnnnnnnnnnnnnnnnnnnnnnnnnnnnnnnnnnnnnnnnnnnnnnnnnnnnnnnnnnnnnnnnnnnnnnnnnnnnnnnnnnnnnnnnnnnnnnnnnnnnnnnnnnnnnnnnnnnnnnnnnnnnnnnnnnnnnnnnnnnnnnnnnnnnnnnnnnnnnnnnnnnnnnnnnnnnnnnnnnnnnnnnnnnnnnnnnnnnnnnnnnnnnnnnnnnnnnnnnnnnnnnnnnnnnnnnnnnnnnnnnnnnnnnnnnnnnnnnnnnnnnnnnnnnnnnnnnnnnnnnnnnnnnnnnnnnnnnnnnnnnnnnnnnnnnnnnnnnnnnnnnnnnnnnnnnnnnnnnnnnnnnnnnnnnnnnnnnnnnnnnnnnnnnnnnnnnnnnnnnnnnnnnnnnnnnnnnnnnnnnnnnnnnnnnnnnnnnnnnnnnnnnnnnnnnnnnnnnnnnnnnnnnnnnnnnnnnnnnnnnnnnnnnnnnnnnnnnnnnnnnnnnnnnnnnnnnnnnnnnnnnnnnnnnnnnnnnnnnnnnnnnnnnnnnnnnnnnnnnnnnnnnnnnnnnnnnnnnnnnnnnnnnnnnnnnnnnnnnnnnnnnnnnnnnnnnnnnnnnnnnnnnnnnnnnnnnnnnnnnnnnnnnnnnnnnnnnnnnnnnnnnnnnnnnnnnnnnnnnnnnnnnnnnnnnnnnnnnnnnnnnnnnnnnnnnnnnnnnnnnnnnnnnnnnnnnnnnnnnnnnnnnnnnnnnnnnnnnnnnnnnnnnnnnnnnnnnnnnnnnnnnnnnnnnnnnnnnnnnnnnnnnnnnnnnnnnnnnnnnnnnnnnnnnnnnnnnnnnnnnnnnnnnnnnnnnnnnnnnnnnnnnnnnnnnnnnnnnnnnnnnnnnnnnnnnnnnnnnnnnnnnnnnnnnnnnnnnnnnnnnnnnnnnnnnnnnnnnnnnnnnnnnnnnnnnnnnnnnnnnnnnnnnnnnnnnnnnnnnnnnnnnnnnnnnnnnnnnnnnnnnnnnnnnnnnnnnnnnnnnnnnnnnnnnnnnnnnnnnnnnnnnnnnnnnnnnnnnnnnnnnnnnnnnnnnnnnnnnnnnnnnnnnnnnnnnnnnnnnnnnnnnnnnnnnnnnnnnnnnnnnnnnnnnnnnnnnnnnnnnnnnnnnnnnnnnnnnnnnnnnnnnnnnnnnnnnnnnnnnnnnnnnnnnnnnnnnnnnnnnnnnnnnnnnnnnnnnnnnnnnnnnnnnnnnnnnnnnnnnnnnnnnnnnnnnnnnnnnnnnnnnnnnnnnnnnnnnnnnnnnnnnnnnnnnnnnnnnnnnnnnnnnnnnnnnnnnnnnnnnnnnnnnnnnnnnnnnnnnnnnnnnnnnnnnnnnnnnnnnnnnnnnnnnnnnnnnnnnnnnnnnnnnnnnnnnnnnnnnnnnnnnnnnnnnnnnnnnnnnnnnnnnnnnnnnnnnnnnnnnnnnnnnnnnnnnnnnnnnnnnnnnnnnnnnnnnnnnnnnnnnnnnnnnnnnnnnnnnnnnnnnnnnnnnnnnnnnnnnnnnnnnnnnnnnnnnnnnnnnnnnnnnnnnnnnnnnnnnnnnnnnnnnnnnnnnnnnnnnnnnnnnnnnnnnnnnnnnnnnnnnnnnnnnnnnnnnnnnnnnnnnnnnnnnnnnnnnnnnnnnnnnnnnnnnnnnnnnnnnnnnnnnnnnnnnnnnnnnnnnnnnnnnnnnnnnnnnnnnnnnnnnnnnnnnnnnnnnnnnnnnnnnnnnnnnnnnnnnnnnnnnnnnnnnnnnnnnnnnnnnnnnnnnnnnnnnnnnnnnnnnnnnnnnnnnnnnnnnnnnnnnnnnnnnnnnnnnnnnnnnnnnnnnnnnnnnnnnnnnnnnnnnnnnnnnnnnnnnnnnnnnnnnnnnnnnnnnnnnnnnnnnnnnnnnnnnnnnnnnnnnnnnnnnnnnnnnnnnnnnnnnnnnnnnnnnnnnnnnnnnnnnnnnnnnnnnnnnnnnnnnnnnnnnnnnnnnnnnnnnnnnnnnnnnnnnnnnnnnnnnnnnnnnnnnnnnnnnnnnnnnnnnnnnnnnnnnnnnnnnnnnnnnnnnnnnnnnnnnnnnnnnnnnnnnnnnnnnnnnnnnnnnnnnnnnnnnnnnnnnnnnnnnnnnnnnnnnnnnnnnnnnnnnnnnnnnnnnnnnnnnnnnnnnnnnnnnnnnnnnnnnnnnnnnnnnnnnnnnnnnnnnnnnnnnnnnnnnnnnnnnnnnnnnnnnnnnnnnnnnnnnnnnnnnnnnnnnnnnnnnnnnnnnnnnnnnnnnnnnnnnnnnnnnnnnnnnnnnnnnnnnnnnnnnnnnnnnnnnnnnnnnnnnnnnnnnnnnnnnnnnnnnnnnnnnnnnnnnnnnnnnnnnnnnnnnnnnnnnnnnnnnnnnnnnnnnnnnnnnnnnnnnnnnnnnnnnnnnnnnnnnnnnnnnnnnnnnnnnnnnnnnnnnnnnnnnnnnnnnnnnnnnnnnnnnnnnnnnnnnnnnnnnnnnnnnnnnnnnnnnnnnnnnnnnnnnnnnnnnnnnnnnnnnnnnnnnnnnnnnnnnnnnnnnnnnnnnnnnnnnnnnnnnnnnnnnnnnnnnnnnnnnnnnnnnnnnnnnnnnnnnnnnnnnnnnnnnnnnnnnnnnnnnnnnnnnnnnnnnnnnnnnnnnnnnnnnnnnnnnnnnnnnnnnnnnnnnnnnnnnnnnnnnnnnnnnnnnnnnnnnnnnnnnnnnnnnnnnnnnnnnnnnnnnnnnnnnnnnnnnnnnnnnnnnnnnnnnnnnnnnnnnnnnnnnnnnnnnnnnnnnnnnnnnnnnnnnnnnnnnnnnnnnnnnnnnnnnnnnnnnnnnnnnnnnnnnnnnnnnnnnnnnnnnnnnnnnnnnnnnnnnnnnnnnnnnnnnnnnnnnnnnnnnnnnnnnnnnnnnnnnnnnnnnnnnnnnnnnnnnnnnnnnnnnnnnnnnnnnnnnnnnnnnnnnnnnnnnnnnnnnnnnnnnnnnnnnnnnnnnnnnnnnnnnnnnnnnnnnnnnnnnnnnnnnnnnnnnnnnnnnnnnnnnnnnnnnnnnnnnnnnnnnnnnnnnnnnnnnnnnnnnnnnnnnnnnnnnnnnnnnnnnnnnnnnnnnnnnnnnnnnnnnnnnnnnnnnnnnnnnnnnnnnnnnnnnnnnnnnnnnnnnnnnnnnnnnnnnnnnnnnnnnnnnnnnnnnnnnnnnnnnnnnnnnnnnnnnnnnnnnnnnnnnnnnnnnnnnnnnnnnnnnnnnnnnnnnnnnnnnnnnnnnnnnnnnnnnnnnnnnnnnnnnnnnnnnnnnnnnnnnnnnnnnnnnnnnnnnnnnnnnnnnnnnnnnnnnnnnnnnnnnnnnnnnnnnnnnnnnnnnnnnnnnnnnnnnnnnnnnnnnnnnnnnnnnnnnnnnnnnnnnnnnnnnnnnnnnnnnnnnnnnnnnnnnnnnnnnnnnnnnnnnnnnnnnnnnnnnnnnnnnnnnnnnnnnnnnnnnnnnnnnnnnnnnnnnnnnnnnnnnnnnnnnnnnnnnnnnnnnnnnnnnnnnnnnnnnnnnnnnnnnnnnnnnnnnnnnnnnnnnnnnnnnnnnnnnnnnnnnnnnnnnnnnnnnnnnnnnnnnnnnnnnnnnnnnnnnnnnnnnnnnnnnnnnnnnnnnnnnnnnnnnnnnnnnnnnnnnnnnnnnnnnnnnnnnnnnnnnnnnnnnnnnnnnnnnnnnnnnnnnnnnnnnnnnnnnnnnnnnnnnnnnnnnnnnnnnnnnnnnnnnnnnnnnnnnnnnnnnnnnnnnnnnnnnnnnnnnnnnnnnnnnnnnnnnnnnnnnnnnnnnnnnnnnnnnnnnnnnnnnnnnnnnnnnnnnnnnnnnnnnnnnnnnnnnnnnnnnnnnnnnnnnnnnnnnnnnnnnnnnnnnnnnnnnnnnnnnnnnnnnnnnnnnnnnnnnnnnnnnnnnnnnnnnnnnnnnnnnnnnnnnnnnnnnnnnnnnnnnnnnnnnnnnnnnnnnnnnnnnnnnnnnnnnnnnnnnnnnnnnnnnnnnnnnnnnnnnnnnnnnnnnnnnnnnnnnnnnnnnnnnnnnnnnnnnnnnnnnnnnnnnnnnnnnnnnnnnnnnnnnnnnnnnnnnnnnnnnnnnnnnnnnnnnnnnnnnnnnnnnnnnnnnnnnnnnnnnnnnnnnnnnnnnnnnnnnnnnnnnnnnnnnnnnnnnnnnnnnnnnnnnnnnnnnnnnnnnnnnnnnnnnnnnnnnnnnnnnnnnnnnnnnnnnnnnnnnnnnnnnnnnnnnnnnnnnnnnnnnnnnnnnnnnnnnnnnnnnnnnnnnnnnnnnnnnnnnnnnnnnnnnnnnnnnnnnnnnnnnnnnnnnnnnnnnnnnnnnnnnnnnnnnnnnnnnnnnnnnnnnnnnnnnnnnnnnnnnnnnnnnnnnnnnnnnnnnnnnnnnnnnnnnnnnnnnnnnnnnnnnnnnnnnnnnnnnnnnnnnnnnnnnnnnnnnnnnnnnnnnnnnnnnnnnnnnnnnnnnnnnnnnnnnnnnnnnnnnnnnnnnnnnnnnnnnnnnnnnnnnnnnnnnnnnnnnnnnnnnnnnnnnnnnnnnnnnnnnnnnnnnnnnnnnnnnnnnnnnnnnnnnnnnnnnnnnnnnnnnnnnnnnnnnnnnnnnnnnnnnnnnnnnnnnnnnnnnnnnnnnnnnnnnnnnnnnnnnnnnnnnnnnnnnnnnnnnnnnnnnnnnnnnnnnnnnnnnnnnnnnnnnnnnnnnnnnnnnnnnnnnnnnnnnnnnnnnnnnnnnnnnnnnnnnnnnnnnnnnnnnnnnnnnnnnnnnnnnnnnnnnnnnnnnnnnnnnnnnnnnnnnnnnnnnnnnnnnnnnnnnnnnnnnnnnnnnnnnnnnnnnnnnnnnnnnnnnnnnnnnnnnnnnnnnnnnnnnnnnnnnnnnnnnnnnnnnnnnnnnnnnnnnnnnnnnnnnnnnnnnnnnnnnnnnnnnnnnnnnnnnnnnnnnnnnnnnnnnnnnnnnnnnnnnnnnnnnnnnnnnnnnnnnnnnnnnnnnnnnnnnnnnnnnnnnnnnnnnnnnnnnnnnnnnnnnnnnnnnnnnnnnnnnnnnnnnnnnnnnnnnnnnnnnnnnnnnnnnnnnnnnnnnnnnnnnnnnnnnnnnnnnnnnnnnnnnnnnnnnnnnnnnnnnnnnnnnnnnnnnnnnnnnnnnnnnnnnnnnnnnnnnnnnnnnnnnnnnnnnnnnnnnnnnnnnnnnnnnnnnnnnnnnnnnnnnnnnnnnnnnnnnnnnnnnnnnnnnnnnnnnnnnnnnnnnnnnnnnnnnnnnnnnnnnnnnnnnnnnnnnnnnnnnnnnnnnnnnnnnnnnnnnnnnnnnnnnnnnnnnnnnnnnnnnnnnnnnnnnnnnnnnnnnnnnnnnnnnnnnnnnnnnnnnnnnnnnnnnnnnnnnnnnnnnnnnnnnnnnnnnnnnnnnnnnnnnnnnnnnnnnnnnnnnnnnnnnnnnnnnnnnnnnnnnnnnnnnnnnnnnnnnnnnnnnnnnnnnnnnnnnnnnnnnnnnnnnnnnnnnnnnnnnnnnnnnnnnnnnnnnnnnnnnnnnnnnnnnnnnnnnnnnnnnnnnnnnnnnnnnnnnnnnnnnnnnnnnnnnnnnnnnnnnnnnnnnnnnnnnnnnnnnnnnnnnnnnnnnnnnnnnnnnnnnnnnnnnnnnnnnnnnnnnnnnnnnnnnnnnnnnnnnnnnnnnnnnnnnnnnnnnnnnnnnnnnnnnnnnnnnnnnnnnnnnnnnnnnnnnnnnnnnnnnnnnnnnnnnnnnnnnnnnnnnnnnnnnnnnnnnnnnnnnnnnnnnnnnnnnnnnnnnnnnnnnnnnnnnnnnnnnnnnnnnnnnnnnnnnnnnnnnnnnnnnnnnnnnnnnnnnnnnnnnnnnnnnnnnnnnnnnnnnnnnnnnnnnnnnnnnnnnnnnnnnnnnnnnnnnnnnnnnnnnnnnnnnnnnnnnnnnnnnnnnnnnnnnnnnnnnnnnnnnnnnnnnnnnnnnnnnnnnnnnnnnnnnnnnnnnnnnnnnnnnnnnnnnnnnnnnnnnnnnnnnnnnnnnnnnnnnnnnnnnnnnnnnnnnnnnnnnnnnnnnnnnnnnnnnnnnnnnnnnnnnnnnnnnnnnnnnnnnnnnnnnnnnnnnnnnnnnnnnnnnnnnnnnnnnnnnnnnnnnnnnnnnnnnnnnnnnnnnnnnnnnnnnnnnnnnnnnnnnnnnnnnnnnnnnnnnnnnnnnnnnnnnnnnnnnnnnnnnnnnnnnnnnnnnnnnnnnnnnnnnnnnnnnnnnnnnnnnnnnnnnnnnnnnnnnnnnnnnnnnnnnnnnnnnnnnnnnnnnnnnnnnnnnnnnnnnnnnnnnnnnnnnnnnnnnnnnnnnnnnnnnnnnnnnnnnnnnnnnnnnnnnnnnnnnnnnnnnnnnnnnnnnnnnnnnnnnnnnnnnnnnnnnnnnnnnnnnnnnnnnnnnnnnnnnnnnnnnnnnnnnnnnnnnnnnnnnnnnnnnnnnnnnnnnnnnnnnnnnnnnnnnnnnnnnnnnnnnnnnnnnnnnnnnnnnnnnnnnnnnnnnnnnnnnnnnnnnnnnnnnnnnnnnnnnnnnnnnnnnnnnnnnnnnnnnnnnnnnnnnnnnnnnnnnnnnnnnnnnnnnnnnnnnnnnnnnnnnnnnnnnnnnnnnnnnnnnnnnnnnnnnnnnnnnnnnnnnnnnnnnnnnnnnnnnnnnnnnnnnnnnnnnnnnnnnnnnnnnnnnnnnnnnnnnnnnnnnnnnnnnnnnnnnnnnnnnnnnnnnnnnnnnnnnnnnnnnnnnnnnnnnnnnnnnnnnnnnnnnnnnnnnnnnnnnnnnnnnnnnnnnnnnnnnnnnnnnnnnnnnnnnnnnnnnnnnnnnnnnnnnnnnnnnnnnnnnnnnnnnnnnnnnnnnnnnnnnnnnnnnnnnnnnnnnnnnnnnnnnnnnnnnnnnnnnnnnnnnnnnnnnnnnnnnnnnnnnnnnnnnnnnnnnnnnnnnnnnnnnnnnnnnnnnnnnnnnnnnnnnnnnnnnnnnnnnnnnnnnnnnnnnnnnnnnnnnnnnnnnnnnnnnnnnnnnnnnnnnnnnnnnnnnnnnnnnnnnnnnnnnnnnnnnnnnnnnnnnnnnnnnnnnnnnnnnnnnnnnnnnnnnnnnnnnnnnnnnnnnnnnnnnnnnnnnnnnnnnnnnnnnnnnnnnnnnnnnnnnnnnnnnnnnnnnnnnnnnnnnnnnnnnnnnnnnnnnnnnnnnnnnnnnnnnnnnnnnnnnnnnnnnnnnnnnnnnnnnnnnnnnnnnnnnnnnnnnnnnnnnnnnnnnnnnnnnnnnnnnnnnnnnnnnnnnnnnnnnnnnnnnnnnnnnnnnnnnnnnnnnnnnnnnnnnnnnnnnnnnnnnnnnnnnnnnnnnnnnnnnnnnnnnnnnnnnnnnnnnnnnnnnnnnnnnnnnnnnnnnnnnnnnnnnnnnnnnnnnnnnnnnnnnnnnnnnnnnnnnnnnnnnnnnnnnnnnnnnnnnnnnnnnnnnnnnnnnnnnnnnnnnnnnnnnnnnnnnnnnnnnnnnnnnnnnnnnnnnnnnnnnnnnnnnnnnnnnnnnnnnnnnnnnnnnnnnnnnnnnnnnnnnnnnnnnnnnnnnnnnnnnnnnnnnnnnnnnnnnnnnnnnnnnnnnnnnnnnnnnnnnnnnnnnnnnnnnnnnnnnnnnnnnnnnnnnnnnnnnnnnnnnnnnnnnnnnnnnnnnnnnnnnnnnnnnnnnnnnnnnnnnnnnnnnnnnnnnnnnnnnnnnnnnnnnnnnnnnnnnnnnnnnnnnnnnnnnnnnnnnnnnnnnnnnnnnnnnnnnnnnnnnnnnnnnnnnnnnnnnnnnnnnnnnnnnnnnnnnnnnnnnnnnnnnnnnnnnnnnnnnnnnnnnnnnnnnnnnnnnnnnnnnnnnnnnnnnnnnnnnnnnnnnnnnnnnnnnnnnnnnnnnnnnnnnnnnnnnnnnnnnnnnnnnnnnnnnnnnnnnnnnnnnnnnnnnnnnnnnnnnnnnnnnnnnnnnnnnnnnnnnnnnnnnnnnnnnnnnnnnnnnnnnnnnnnnnnnnnnnnnnnnnnnnnnnnnnnnnnnnnnnnnnnnnnnnnnnnnnnnnnnnnnnnnnnnnnnnnnnnnnnnnnnnnnnnnnnnnnnnnnnnnnnnnnnnnnnnnnnnnnnnnnnnnnnnnnnnnnnnnnnnnnnnnnnnnnnnnnnnnnnnnnnnnnnnnnnnnnnnnnnnnnnnnnnnnnnnnnnnnnnnnnnnnnnnnnnnnnnnnnnnnnnnnnnnnnnnnnnnnnnnnnnnnnnnnnnnnnnnnnnnnnnnnnnnnnnnnnnnnnnnnnnnnnnnnnnnnnnnnnnnnnnnnnnnnnnnnnnnnnnnnnnnnnnnnnnnnnnnnnnnnnnnnnnnnnnnnnnnnnnnnnnnnnnnnnnnnnnnnnnnnnnnnnnnnnnnnnnnnnnnnnnnnnnnnnnnnnnnnnnnnnnnnnnnnnnnnnnnnnnnnnnnnnnnnnnnnnnnnnnnnnnnnnnnnnnnnnnnnnnnnnnnnnnnnnnnnnnnnnnnnnnnnnnnnnnnnnnnnnnnnnnnnnnnnnnnnnnnnnnnnnnnnnnnnnnnnnnnnnnnnnnnnnnnnnnnnnnnnnnnnnnnnnnnnnnnnnnnnnnnnnnnnnnnnnnnnnnnnnnnnnnnnnnnnnnnnnnnnnnnnnnnnnnnnnnnnnnnnnnnnnnnnnnnnnnnnnnnnnnnnnnnnnnnnnnnnnnnnnnnnnnnnnnnnnnnnnnnnnnnnnnnnnnnnnnnnnnnnnnnnnnnnnnnnnnnnnnnnnnnnnnnnnnnnnnnnnnnnnnnnnnnnnnnnnnnnnnnnnnnnnnnnnnnnnnnnnnnnnnnnnnnnnnnnnnnnnnnnnnnnnnnnnnnnnnnnnnnnnnnnnnnnnnnnnnnnnnnnnnnnnnnnnnnnnnnnnnnnnnnnnnnnnnnnnnnnnnnnnnnnnnnnnnnnnnnnnnnnnnnnnnnnnnnnnnnnnnnnnnnnnnnnnnnnnnnnnnnnnnnnnnnnnnnnnnnnnnnnnnnnnnnnnnnnnnnnnnnnnnnnnnnnnnnnnnnnnnnnnnnnnnnnnnnnnnnnnnnnnnnnnnnnnnnnnnnnnnnnnnnnnnnnnnnnnnnnnnnnnnnnnnnnnnnnnnnnnnnnnnnnnnnnnnnnnnnnnnnnnnnnnnnnnnnnnnnnnnnnnnnnnnnnnnnnnnnnnnnnnnnnnnnnnnnnnnnnnnnnnnnnnnnnnnnnnnnnnnnnnnnnnnnnnnnnnnnnnnnnnnnnnnnnnnnnnnnnnnnnnnnnnnnnnnnnnnnnnnnnnnnnnnnnnnnnnnnnnnnnnnnnnnnnnnnnnnnnnnnnnnnnnnnnnnnnnnnnnnnnnnnnnnnnnnnnnnnnnnnnnnnnnnnnnnnnnnnnnnnnnnnnnnnnnnnnnnnnnnnnnnnnnnnnnnnnnnnnnnnnnnnnnnnnnnnnnnnnnnnnnnnnnnnnnnnnnnnnnnnnnnnnnnnnnnnnnnnnnnnnnnnnnnnnnnnnnnnnnnnnnnnnnnnnnnnnnnnnnnnnnnnnnnnnnnnnnnnnnnnnnnnnnnnnnnnnnnnnnnnnnnnnnnnnnnnnnnnnnnnnnnnnnnnnnnnnnnnnnnnnnnnnnnnnnnnnnnnnnnnnnnnnnnnnnnnnnnnnnnnnnnnnnnnnnnnnnnnnnnnnnnnnnnnnnnnnnnnnnnnnnnnnnnnnnnnnnnnnnnnnnnnnnnnnnnnnnnnnnnnnnnnnnnnnnnnnnnnnnnnnnnnnnnnnnnnnnnnnnnnnnnnnnnnnnnnnnnnnnnnnnnnnnnnnnnnnnnnnnnnnnnnnnnnnnnnnnnnnnnnnnnnnnnnnnnnnnnnnnnnnnnnnnnnnnnnnnnnnnnnnnnnnnnnnnnnnnnnnnnnnnnnnnnnnnnnnnnnnnnnnnnnnnnnnnnnnnnnnnnnnnnnnnnnnnnnnnnnnnnnnnnnnnnnnnnnnnnnnnnnnnnnnnnnnnnnnnnnnnnnnnnnnnnnnnnnnnnnnnnnnnnnnnnnnnnnnnnnnnnnnnnnnnnnnnnnnnnnnnnnnnnnnnnnnnnnnnnnnnnnnnnnnnnnnnnnnnnnnnnnnnnnnnnnnnnnnnnnnnnnnnnnnnnnnnnnnnnnnnnnnnnnnnnnnnnnnnnnnnnnnnnnnnnnnnnnnnnnnnnnnnnnnnnnnnnnnnnnnnnnnnnnnnnnnnnnnnnnnnnnnnnnnnnnnnnnnnnnnnnnnnnnnnnnnnnnnnnnnnnnnnnnnnnnnnnnnnnnnnnnnnnnnnnnnnnnnnnnnnnnnnnnnnnnnnnnnnnnnnnnnnnnnnnnnnnnnnnnnnnnnnnnnnnnnnnnnnnnnnnnnnnnnnnnnnnnnnnnnnnnnnnnnnnnnnnnnnnnnnnnnnnnnnnnnnnnnnnnnnnnnnnnnnnnnnnnnnnnnnnnnnnnnnnnnnnnnnnnnnnnnnnnnnnnnnnnnnnnnnnnnnnnnnnnnnnnnnnnnnnnnnnnnnnnnnnnnnnnnnnnnnnnnnnnnnnnnnnnnnnnnnnnnnnnnnnnnnnnnnnnnnnnnnnnnnnnnnnnnnnnnnnnnnnnnnnnnnnnnnnnnnnnnnnnnnnnnnnnnnnnnnnnnnnnnnnnnnnnnnnnnnnnnnnnnnnnnnnnnnnnnnnnnnnnnnnnnnnnnnnnnnnnnnnnnnnnnnnnnnnnnnnnnnnnnnnnnnnnnnnnnnnnnnnnnnnnnnnnnnnnnnnnnnnnnnnnnnnnnnnnnnnnnnnnnnnnnnnnnnnnnnnnnnnnnnnnnnnnnnnnnnnnnnnnnnnnnnnnnnnnnnnnnnnnnnnnnnnnnnnnnnnnnnnnnnnnnnnnnnnnnnnnnnnnnnnnnnnnnnnnnnnnnnnnnnnnnnnnnnnnnnnnnnnnnnnnnnnnnnnnnnnnnnnnnnnnnnnnnnnnnnnnnnnnnnnnnnnnnnnnnnnnnnnnnnnnnnnnnnnnnnnnnnnnnnnnnnnnnnnnnnnnnnnnnnnnnnnnnnnnnnnnnnnnnnnnnnnnnnnnnnnnnnnnnnnnnnnnnnnnnnnnnnnnnnnnnnnnnnnnnnnnnnnnnnnnnnnnnnnnnnnnnnnnnnnnnnnnnnnnnnnnnnnnnnnnnnnnnnnnnnnnnnnnnnnnnnnnnnnnnnnnnnnnnnnnnnnnnnnnnnnnnnnnnnnnnnnnnnnnnnnnnnnnnnnnnnnnnnnnnnnnnnnnnnnnnnnnnnnnnnnnnnnnnnnnnnnnnnnnnnnnnnnnnnnnnnnnnnnnnnnnnnnnnnnnnnnnnnnnnnnnnnnnnnnnnnnnnnnnnnnnnnnnnnnnnnnnnnnnnnnnnnnnnnnnnnnnnnnnnnnnnnnnnnnnnnnnnnnnnnnnnnnnnnnnnnnnnnnnnnnnnnnnnnnnnnnnnnnnnnnnnnnnnnnnnnnnnnnnnnnnnnnnnnnnnnnnnnnnnnnnnnnnnnnnnnnnnnnnnnnnnnnnnnnnnnnnnnnnnnnnnnnnnnnnnnnnnnnnnnnnnnnnnnnnnnnnnnnnnnnnnnnnnnnnnnnnnnnnnnnnnnnnnnnnnnnnnnnnnnnnnnnnnnnnnnnnnnnnnnnnnnnnnnnnnnnnnnnnnnnnnnnnnnnnnnnnnnnnnnnnnnnnnnnnnnnnnnnnnnnnnnnnnnnnnnnnnnnnnnnnnnnnnnnnnnnnnnnnnnnnnnnnnnnnnnnnnnnnnnnnnnnnnnnnnnnnnnnnnnnnnnnnnnnnnnnnnnnnnnnnnnnnnnnnnnnnnnnnnnnnnnnnnnnnnnnnnnnnnnnnnnnnnnnnnnnnnnnnnnnnnnnnnnnnnnnnnnnnnnnnnnnnnnnnnnnnnnnnnnnnnnnnnnnnnnnnnnnnnnnnnnnnnnnnnnnnnnnnnnnnnnnnnnnnnnnnnnnnnnnnnnnnnnnnnnnnnnnnnnnnnnnnnnnnnnnnnnnnnnnnnnnnnnnnnnnnnnnnnnnnnnnnnnnnnnnnnnnnnnnnnnnnnnnnnnnnnnnnnnnnnnnnnnnnnnnnnnnnnnnnnnnnnnnnnnnnnnnnnnnnnnnnnnnnnnnnnnnnnnnnnnnnnnnnnnnnnnnnnnnnnnnnnnnnnnnnnnnnnnnnnnnnnnnnnnnnnnnnnnnnnnnnnnnnnnnnnnnnnnnnnnnnnnnnnnnnnnnnnnnnnnnnnnnnnnnnnnnnnnnnnnnnnnnnnnnnnnnnnnnnnnnnnnnnnnnnnnnnnnnnnnnnnnnnnnnnnnnnnnnnnnnnnnnnnnnnnnnnnnnnnnnnnnnnnnnnnnnnnnnnnnnnnnnnnnnnnnnnnnnnnnnnnnnnnnnnnnnnnnnnnnnnnnnnnnnnnnnnnnnnnnnnnnnnnnnnnnnnnnnnnnnnnnnnnnnnnnnnnnnnnnnnnnnnnnnnnnnnnnnnnnnnnnnnnnnnnnnnnnnnnnnnnnnnnnnnnnnnnnnnnnnnnnnnnnnnnnnnnnnnnnnnnnnnnnnnnnnnnnnnnnnnnnnnnnnnnnnnnnnnnnnnnnnnnnnnnnnnnnnnnnnnnnnnnnnnnnnnnnnnnnnnnnnnnnnnnnnnnnnnnnnnnnnnnnnnnnnnnnnnnnnnnnnnnnnnnnnnnnnnnnnnnnnnnnnnnnnnnnnnnnnnnnnnnnnnnnnnnnnnnnnnnnnnnnnnnnnnnnnnnnnnnnnnnnnnnnnnnnnnnnnnnnnnnnnnnnnnnnnnnnnnnnnnnnnnnnnnnnnnnnnnnnnnnnnnnnnnnnnnnnnnnnnnnnnnnnnnnnnnnnnnnnnnnnnnnnnnnnnnnnnnnnnnnnnnnnnnnnnnnnnnnnnnnnnnnnnnnnnnnnnnnnnnnnnnnnnnnnnnnnnnnnnnnnnnnnnnnnnnnnnnnnnnnnnnnnnnnnnnnnnnnnnnnnnnnnnnnnnnnnnnnnnnnnnnnnnnnnnnnnnnnnnnnnnnnnnnnnnnnnnnnnnnnnnnnnnnnnnnnnnnnnnnnnnnnnnnnnnnnnnnnnnnnnnnnnnnnnnnnnnnnnnnnnnnnnnnnnnnnnnnnnnnnnnnnnnnnnnnnnnnnnnnnnnnnnnnnnnnnnnnnnnnnnnnnnnnnnnnnnnnnnnnnnnnnnnnnnnnnnnnnnnnnnnnnnnnnnnnnnnnnnnnnnnnnnnnnnnnnnnnnnnnnnnnnnnnnnnnnnnnnnnnnnnnnnnnnnnnnnnnnnnnnnnnnnnnnnnnnnnnnnnnnnnnnnnnnnnnnnnnnnnnnnnnnnnnnnnnnnnnnnnnnnnnnnnnnnnnnnnnnnnnnnnnnnnnnnnnnnnnnnnnnnnnnnnnnnnnnnnnnnnnnnnnnnnnnnnnnnnnnnnnnnnnnnnnnnnnnnnnnnnnnnnnnnnnnnnnnnnnnnnnnnnnnnnnnnnnnnnnnnnnnnnnnnnnnnnnnnnnnnnnnnnnnnnnnnnnnnnnnnnnnnnnnnnnnnnnnnnnnnnnnnnnnnnnnnnnnnnnnnnnnnnnnnnnnnnnnnnnnnnnnnnnnnnnnnnnnnnnnnnnnnnnnnnnnnnnnnnnnnnnnnnnnnnnnnnnnnnnnnnnnnnnnnnnnnnnnnnnnnnnnnnnnnnnnnnnnnnnnnnnnnnnnnnnnnnnnnnnnnnnnnnnnnnnnnnnnnnnnnnnnnnnnnnnnnnnnnnnnnnnnnnnnnnnnnnnnnnnnnnnnnnnnnnnnnnnnnnnnnnnnnnnnnnnnnnnnnnnnnnnnnnnnnnnnnnnnnnnnnnnnnnnnnnnnnnnnnnnnnnnnnnnnnnnnnnnnnnnnnnnnnnnnnnnnnnnnnnnnnnnnnnnnnnnnnnnnnnnnnnnnnnnnnnnnnnnnnnnnnnnnnnnnnnnnnnnnnnnnnnnnnnnnnnnnnnnnnnnnnnnnnnnnnnnnnnnnnnnnnnnnnnnnnnnnnnnnnnnnnnnnnnnnnnnnnnnnnnnnnnnnnnnnnnnnnnnnnnnnnnnnnnnnnnnnnnnnnnnnnnnnnnnnnnnnnnnnnnnnnnnnnnnnnnnnnnnnnnnnnnnnnnnnnnnnnnnnnnnnnnnnnnnnnnnnnnnnnnnnnnnnnnnnnnnnnnnnnnnnnnnnnnnnnnnnnnnnnnnnnnnnnnnnnnnnnnnnnnnnnnnnnnnnnnnnnnnnnnnnnnnnnnnnnnnnnnnnnnnnnnnnnnnnnnnnnnnnnnnnnnnnnnnnnnnnnnnnnnnnnnnnnnnnnnnnnnnnnnnnnnnnnnnnnnnnnnnnnnnnnnnnnnnnnnnnnnnnnnnnnnnnnnnnnnnnnnnnnnnnnnnnnnnnnnnnnnnnnnnnnnnnnnnnnnnnnnnnnnnnnnnnnnnnnnnnnnnnnnnnnnnnnnnnnnnnnnnnnnnnnnnnnnnnnnnnnnnnnnnnnnnnnnnnnnnnnnnnnnnnnnnnnnnnnnnnnnnnnnnnnnnnnnnnnnnnnnnnnnnnnnnnnnnnnnnnnnnnnnnnnnnnnnnnnnnnnnnnnnnnnnnnnnnnnnnnnnnnnnnnnnnnnnnnnnnnnnnnnnnnnnnnnnnnnnnnnnnnnnnnnnnnnnnnnnnnnnnnnnnnnnnnnnnnnnnnnnnnnnnnnnnnnnnnnnnnnnnnnnnnnnnnnnnnnnnnnnnnnnnnnnnnnnnnnnnnnnnnnnnnnnnnnnnnnnnnnnnnnnnnnnnnnnnnnnnnnnnnnnnnnnnnnnnnnnnnnnnnnnnnnnnnnnnnnnnnnnnnnnnnnnnnnnnnnnnnnnnnnnnnnnnnnnnnnnnnnnnnnnnnnnnnnnnnnnnnnnnnnnnnnnnnnnnnnnnnnnnnnnnnnnnnnnnnnnnnnnnnnnnnnnnnnnnnnnnnnnnnnnnnnnnnnnnnnnnnnnnnnnnnnnnnnnnnnnnnnnnnnnnnnnnnnnnnnnnnnnnnnnnnnnnnnnnnnnnnnnnnnnnnnnnnnnnnnnnnnnnnnnnnnnnnnnnnnnnnnnnnnnnnnnnnnnnnnnnnnnnnnnnnnnnnnnnnnnnnnnnnnnnnnnnnnnnnnnnnnnnnnnnnnnnnnnnnnnnnnnnnnnnnnnnnnnnnnnnnnnnnnnnnnnnnnnnnnnnnnnnnnnnnnnnnnnnnnnnnnnnnnnnnnnnnnnnnnnnnnnnnnnnnnnnnnnnnnnnnnnnnnnnnnnnnnnnnnnnnnnnnnnnnnnnnnnnnnnnnnnnnnnnnnnnnnnnnnnnnnnnnnnnnnnnnnnnnnnnnnnnnnnnnnnnnnnnnnnnnnnnnnnnnnnnnnnnnnnnnnnnnnnnnnnnnnnnnnnnnnnnnnnnnnnnnnnnnnnnnnnnnnnnnnnnnnnnnnnnnnnnnnnnnnnnnnnnnnnnnnnnnnnnnnnnnnnnnnnnnnnnnnnnnnnnnnnnnnnnnnnnnnnnnnnnnnnnnnnnnnnnnnnnnnnnnnnnnnnnnnnnnnnnnnnnnnnnnnnnnnnnnnnnnnnnnnnnnnnnnnnnnnnnnnnnnnnnnnnnnnnnnnnnnnnnnnnnnnnnnnnnnnnnnnnnnnnnnnnnnnnnnnnnnnnnnnnnnnnnnnnnnnnnnnnnnnnnnnnnnnnnnnnnnnnnnnnnnnnnnnnnnnnnnnnnnnnnnnnnnnnnnnnnnnnnnnnnnnnnnnnnnnnnnnnnnnnnnnnnnnnnnnnnnnnnnnnnnnnnnnnnnnnnnnnnnnnnnnnnnnnnnnnnnnnnnnnnnnnnnnnnnnnnnnnnnnnnnnnnnnnnnnnnnnnnnnnnnnnnnnnnnnnnnnnnnnnnnnnnnnnnnnnnnnnnnnnnnnnnnnnnnnnnnnnnnnnnnnnnnnnnnnnnnnnnnnnnnnnnnnnnnnnnnnnnnnnnnnnnnnnnnnnnnnnnnnnnnnnnnnnnnnnnnnnnnnnnnnnnnnnnnnnnnnnnnnnnnnnnnnnnnnnnnnnnnnnnnnnnnnnnnnnnnnnnnnnnnnnnnnnnnnnnnnnnnnnnnnnnnnnnnnnnnnnnnnnnnnnnnnnnnnnnnnnnnnnnnnnnnnnnnnnnnnnnnnnnnnnnnnnnnnnnnnnnnnnnnnnnnnnnnnnnnnnnnnnnnnnnnnnnnnnnnnnnnnnnnnnnnnnnnnnnnnnnnnnnnnnnnnnnnnnnnnnnnnnnnnnnnnnnnnnnnnnnnnnnnnnnnnnnnnnnnnnnnnnnnnnnnnnnnnnnnnnnnnnnnnnnnnnnnnnnnnnnnnnnnnnnnnnnnnnnnnnnnnnnnnnnnnnnnnnnnnnnnnnnnnnnnnnnnnnnnnnnnnnnnnnnnnnnnnnnnnnnnnnnnnnnnnnnnnnnnnnnnnnnnnnnnnnnnnnnnnnnnnnnnnnnnnnnnnnnnnnnnnnnnnnnnnnnnnnnnnnnnnnnnnnnnnnnnnnnnnnnnnnnnnnnnnnnnnnnnnnnnnnnnnnnnnnnnnnnnnnnnnnnnnnnnnnnnnnnnnnnnnnnnnnnnnnnnnnnnnnnnnnnnnnnnnnnnnnnnnnnnnnnnnnnnnnnnnnnnnnnnnnnnnnnnnnnnnnnnnnnnnnnnnnnnnnnnnnnnnnnnnnnnnnnnnnnnnnnnnnnnnnnnnnnnnnnnnnnnnnnnnnnnnnnnnnnnnnnnnnnnnnnnnnnnnnnnnnnnnnnnnnnnnnnnnnnnnnnnnnnnnnnnnnnnnnnnnnnnnnnnnnnnnnnnnnnnnnnnnnnnnnnnnnnnnnnnnnnnnnnnnnnnnnnnnnnnnnnnnnnnnnnnnnnnnnnnnnnnnnnnnnnnnnnnnnnnnnnnnnnnnnnnnnnnnnnnnnnnnnnnnnnnnnnnnnnnnnnnnnnnnnnnnnnnnnnnnnnnnnnnnnnnnnnnnnnnnnnnnnnnnnnnnnnnnnnnnnnnnnnnnnnnnnnnnnnnnnnnnnnnnnnnnnnnnnnnnnnnnnnnnnnnnnnnnnnnnnnnnnnnnnnnnnnnnnnnnnnnnnnnnnnnnnnnnnnnnnnnnnnnnnnnnnnnnnnnnnnnnnnnnnnnnnnnnnnnnnnnnnnnnnnnnnnnnnnnnnnnnnnnnnnnnnnnnnnnnnnnnnnnnnnnnnnnnnnnnnnnnnnnnnnnnnnnnnnnnnnnnnnnnnnnnnnnnnnnnnnnnnnnnnnnnnnnnnnnnnnnnnnnnnnnnnnnnnnnnnnnnnnnnnnnnnnnnnnnnnnnnnnnnnnnnnnnnnnnnnnnnnnnnnnnnnnnnnnnnnnnnnnnnnnnnnnnnnnnnnnnnnnnnnnnnnnnnnnnnnnnnnnnnnnnnnnnnnnnnnnnnnnnnnnnnnnnnnnnnnnnnnnnnnnnnnnnnnnnnnnnnnnnnnnnnnnnnnnnnnnnnnnnnnnnnnnnnnnnnnnnnnnnnnnnnnnnnnnnnnnnnnnnnnnnnnnnnnnnnnnnnnnnnnnnnnnnnnnnnnnnnnnnnnnnnnnnnnnnnnnnnnnnnnnnnnnnnnnnnnnnnnnnnnnnnnnnnnnnnnnnnnnnnnnnnnnnnnnnnnnnnnnnnnnnnnnnnnnnnnnnnnnnnnnnnnnnnnnnnnnnnnnnnnnnnnnnnnnnnnnnnnnnnnnnnnnnnnnnnnnnnnnnnnnnnnnnnnnnnnnnnnnnnnnnnnnnnnnnnnnnnnnnnnnnnnnnnnnnnnnnnnnnnnnnnnnnnnnnnnnnnnnnnnnnnnnnnnnnnnnnnnnnnnnnnnnnnnnnnnnnnnnnnnnnnnnnnnnnnnnnnnnnnnnnnnnnnnnnnnnnnnnnnnnnnnnnnnnnnnnnnnnnnnnnnnnnnnnnnnnnnnnnnnnnnnnnnnnnnnnnnnnnnnnnnnnnnnnnnnnnnnnnnnnnnnnnnnnnnnnnnnnnnnnnnnnnnnnnnnnnnnnnnnnnnnnnnnnnnnnnnnnnnnnnnnnnnnnnnnnnnnnnnnnnnnnnnnnnnnnnnnnnnnnnnnnnnnnnnnnnnnnnnnnnnnnnnnnnnnnnnnnnnnnnnnnnnnnnnnnnnnnnnnnnnnnnnnnnnnnnnnnnnnnnnnnnnnnnnnnnnnnnnnnnnnnnnnnnnnnnnnnnnnnnnnnnnnnnnnnnnnnnnnnnnnnnnnnnnnnnnnnnnnnnnnnnnnnnnnnnnnnnnnnnnnnnnnnnnnnnnnnnnnnnnnnnnnnnnnnnnnnnnnnnnnnnnnnnnnnnnnnnnnnnnnnnnnnnnnnnnnnnnnnnnnnnnnnnnnnnnnnnnnnnnnnnnnnnnnnnnnnnnnnnnnnnnnnnnnnnnnnnnnnnnnnnnnnnnnnnnnnnnnnnnnnnnnnnnnnnnnnnnnnnnnnnnnnnnnnnnnnnnnnnnnnnnnnnnnnnnnnnnnnnnnnnnnnnnnnnnnnnnnnnnnnnnnnnnnnnnnnnnnnnnnnnnnnnnnnnnnnnnnnnnnnnnnnnnnnnnnnnnnnnnnnnnnnnnnnnnnnnnnnnnnnnnnnnnnnnnnnnnnnnnnnnnnnnnnnnnnnnnnnnnnnnnnnnnnnnnnnnnnnnnnnnnnnnnnnnnnnnnnnnnnnnnnnnnnnnnnnnnnnnnnnnnnnnnnnnnnnnnnnnnnnnnnnnnnnnnnnnnnnnnnnnnnnnnnnnnnnnnnnnnnnnnnnnnnnnnnnnnnnnnnnnnnnnnnnnnnnnnnnnnnnnnnnnnnnnnnnnnnnnnnnnnnnnnnnnnnnnnnnnnnnnnnnnnnnnnnnnnnnnnnnnnnnnnnnnnnnnnnnnnnnnnnnnnnnnnnnnnnnnnnnnnnnnnnnnnnnnnnnnnnnnnnnnnnnnnnnnnnnnnnnnnnnnnnnnnnnnnnnnnnnnnnnnnnnnnnnnnnnnnnnnnnnnnnnnnnnnnnnnnnnnnnnnnnnnnnnnnnnnnnnnnnnnnnnnnnnnnnnnnnnnnnnnnnnnnnnnnnnnnnnnnnnnnnnnnnnnnnnnnnnnnnnnnnnnnnnnnnnnnnnnnnnnnnnnnnnnnnnnnnnnnnnnnnnnnnnnnnnnnnnnnnnnnnnnnnnnnnnnnnnnnnnnnnnnnnnnnnnnnnnnnnnnnnnnnnnnnnnnnnnnnnnnnnnnnnnnnnnnnnnnnnnnnnnnnnnnnnnnnnnnnnnnnnnnnnnnnnnnnnnnnnnnnnnnnnnnnnnnnnnnnnnnnnnnnnnnnnnnnnnnnnnnnnnnnnnnnnnnnnnnnnnnnnnnnnnnnnnnnnnnnnnnnnnnnnnnnnnnnnnnnnnnnnnnnnnnnnnnnnnnnnnnnnnnnnnnnnnnnnnnnnnnnnnnnnnnnnnnnnnnnnnnnnnnnnnnnnnnnnnnnnnnnnnnnnnnnnnnnnnnnnnnnnnnnnnnnnnnnnnnnnnnnnnnnnnnnnnnnnnnnnnnnnnnnnnnnnnnnnnnnnnnnnnnnnnnnnnnnnnnnnnnnnnnnnnnnnnnnnnnnnnnnnnnnnnnnnnnnnnnnnnnnnnnnnnnnnnnnnnnnnnnnnnnnnnnnnnnnnnnnnnnnnnnnnnnnnnnnnnnnnnnnnnnnnnnnnnnnnnnnnnnnnnnnnnnnnnnnnnnnnnnnnnnnnnnnnnnnnnnnnnnnnnnnnnnnnnnnnnnnnnnnnnnnnnnnnnnnnnnnnnnnnnnnnnnnnnnnnnnnnnnnnnnnnnnnnnnnnnnnnnnnnnnnnnnnnnnnnnnnnnnnnnnnnnnnnnnnnnnnnnnnnnnnnnnnnnnnnnnnnnnnnnnnnnnnnnnnnnnnnnnnnnnnnnnnnnnnnnnnnnnnnnnnnnnnnnnnnnnnnnnnnnnnnnnnnnnnnnnnnnnnnnnnnnnnnnnnnnnnnnnnnnnnnnnnnnnnnnnnnnnnnnnnnnnnnnnnnnnnnnnnnnnnnnnnnnnnnnnnnnnnnnnnnnnnnnnnnnnnnnnnnnnnnnnnnnnnnnnnnnnnnnnnnnnnnnnnnnnnnnnnnnnnnnnnnnnnnnnnnnnnnnnnnnnnnnnnnnnnnnnnnnnnnnnnnnnnnnnnnnnnnnnnnnnnnnnnnnnnnnnnnnnnnnnnnnnnnnnnnnnnnnnnnnnnnnnnnnnnnnnnnnnnnnnnnnnnnnnnnnnnnnnnnnnnnnnnnnnnnnnnnnnnnnnnnnnnnnnnnnnnnnnnnnnnnnnnnnnnnnnnnnnnnnnnnnnnnnnnnnnnnnnnnnnnnnnnnnnnnnnnnnnnnnnnnnnnnnnnnnnnnnnnnnnnnnnnnnnnnnnnnnnnnnnnnnnnnnnnnnnnnnnnnnnnnnnnnnnnnnnnnnnnnnnnnnnnnnnnnnnnnnnnnnnnnnnnnnnnnnnnnnnnnnnnnnnnnnnnnnnnnnnnnnnnnnnnnnnnnnnnnnnnnnnnnnnnnnnnnnnnnnnnnnnnnnnnnnnnnnnnnnnnnnnnnnnnnnnnnnnnnnnnnnnnnnnnnnnnnnnnnnnnnnnnnnnnnnnnnnnnnnnnnnnnnnnnnnnnnnnnnnnnnnnnnnnnnnnnnnnnnnnnnnnnnnnnnnnnnnnnnnnnnnnnnnnnnnnnnnnnnnnnnnnnnnnnnnnnnnnnnnnnnnnnnnnnnnnnnnnnnnnnnnnnnnnnnnnnnnnnnnnnnnnnnnnnnnnnnnnnnnnnnnnnnnnnnnnnnnnnnnnnnnnnnnnnnnnnnnnnnnnnnnnnnnnnnnnnnnnnnnnnnnnnnnnnnnnnnnnnnnnnnnnnnnnnnnnnnnnnnnnnnnnnnnnnnnnnnnnnnnnnnnnnnnnnnnnnnnnnnnnnnnnnnnnnnnnnnnnnnnnnnnnnnnnnnnnnnnnnnnnnnnnnnnnnnnnnnnnnnnnnnnnnnnnnnnnnnnnnnnnnnnnnnnnnnnnnnnnnnnnnnnnnnnnnnnnnnnnnnnnnnnnnnnnnnnnnnnnnnnnnnnnnnnnnnnnnnnnnnnnnnnnnnnnnnnnnnnnnnnnnnnnnnnnnnnnnnnnnnnnnnnnnnnnnnnnnnnnnnnnnnnnnnnnnnnnnnnnnnnnnnnnnnnnnnnnnnnnnnnnnnnnnnnnnnnnnnnnnnnnnnnnnnnnnnnnnnnnnnnnnnnnnnnnnnnnnnnnnnnnnnnnnnnnnnnnnnnnnnnnnnnnnnnnnnnnnnnnnnnnnnnnnnnnnnnnnnnnnnnnnnnnnnnnnnnnnnnnnnnnnnnnnnnnnnnnnnnnnnnnnnnnnnnnnnnnnnnnnnnnnnnnnnnnnnnnnnnnnnnnnnnnnnnnnnnnnnnnnnnnnnnnnnnnnnnnnnnnnnnnnnnnnnnnnnnnnnnnnnnnnnnnnnnnnnnnnnnnnnnnnnnnnnnnnnnnnnnnnnnnnnnnnnnnnnnnnnnnnnnnnnnnnnnnnnnnnnnnnnnnnnnnnnnnnnnnnnnnnnnnnnnnnnnnnnnnnnnnnnnnnnnnnnnnnnnnnnnnnnnnnnnnnnnnnnnnnnnnnnnnnnnnnnnnnnnnnnnnnnnnnnnnnnnnnnnnnnnnnnnnnnnnnnnnnnnnnnnnnnnnnnnnnnnnnnnnnnnnnnnnnnnnnnnnnnnnnnnnnnnnnnnnnnnnnnnnnnnnnnnnnnnnnnnnnnnnnnnnnnnnnnnnnnnnnnnnnnnnnnnnnnnnnnnnnnnnnnnnnnnnnnnnnnnnnnnnnnnnnnnnnnnnnnnnnnnnnnnnnnnnnnnnnnnnnnnnnnnnnnnnnnnnnnnnnnnnnnnnnnnnnnnnnnnnnnnnnnnnnnnnnnnnnnnnnnnnnnnnnnnnnnnnnnnnnnnnnnnnnnnnnnnnnnnnnnnnnnnnnnnnnnnnnnnnnnnnnnnnnnnnnnnnnnnnnnnnnnnnnnnnnnnnnnnnnnnnnnnnnnnnnnnnnnnnnnnnnnnnnnnnnnnnnnnnnnnnnnnnnnnnnnnnnnnnnnnnnnnnnnnnnnnnnnnnnnnnnnnnnnnnnnnnnnnnnnnnnnnnnnnnnnnnnnnnnnnnnnnnnnnnnnnnnnnnnnnnnnnnnnnnnnnnnnnnnnnnnnnnnnnnnnnnnnnnnnnnnnnnnnnnnnnnnnnnnnnnnnnnnnnnnnnnnnnnnnnnnnnnnnnnnnnnnnnnnnnnnnnnnnnnnnnnnnnnnnnnnnnnnnnnnnnnnnnnnnnnnnnnnnnnnnnnnnnnnnnnnnnnnnnnnnnnnnnnnnnnnnnnnnnnnnnnnnnnnnnnnnnnnnnnnnnnnnnnnnnnnnnnnnnnnnnnnnnnnnnnnnnnnnnnnnnnnnnnnnnnnnnnnnnnnnnnnnnnnnnnnnnnnnnnnnnnnnnnnnnnnnnnnnnnnnnnnnnnnnnnnnnnnnnnnnnnnnnnnnnnnnnnnnnnnnnnnnnnnnnnnnnnnnnnnnnnnnnnnnnnnnnnnnnnnnnnnnnnnnnnnnnnnnnnnnnnnnnnnnnnnnnnnnnnnnnnnnnnnnnnnnnnnnnnnnnnnnnnnnnnnnnnnnnnnnnnnnnnnnnnnnnnnnnnnnnnnnnnnnnnnnnnnnnnnnnnnnnnnnnnnnnnnnnnnnnnnnnnnnnnnnnnnnnnnnnnnnnnnnnnnnnnnnnnnnnnnnnnnnnnnnnnnnnnnnnnnnnnnnnnnnnnnnnnnnnnnnnnnnnnnnnnnnnnnnnnnnnnnnnnnnnnnnnnnnnnnnnnnnnnnnnnnnnnnnnnnnnnnnnnnnnnnnnnnnnnnnnnnnnnnnnnnnnnnnnnnnnnnnnnnnnnnnnnnnnnnnnnnnnnnnnnnnnnnnnnnnnnnnnnnnnnnnnnnnnnnnnnnnnnnnnnnnnnnnnnnnnnnnnnnnnnnnnnnnnnnnnnnnnnnnnnnnnnnnnnnnnnnnnnnnnnnnnnnnnnnnnnnnnnnnnnnnnnnnnnnnnnnnnnnnnnnnnnnnnnnnnnnnnnnnnnnnnnnnnnnnnnnnnnnnnnnnnnnnnnnnnnnnnnnnnnnnnnnnnnnnnnnnnnnnnnnnnnnnnnnnnnnnnnnnnnnnnnnnnnnnnnnnnnnnnnnnnnnnnnnnnnnnnnnnnnnnnnnnnnnnnnnnnnnnnnnnnnnnnnnnnnnnnnnnnnnnnnnnnnnnnnnnnnnnnnnnnnnnnnnnnnnnnnnnnnnnnnnnnnnnnnnnnnnnnnnnnnnnnnnnnnnnnnnnnnnnnnnnnnnnnnnnnnnnnnnnnnnnnnnnnnnnnnnnnnnnnnnnnnnnnnnnnnnnnnnntaccgcgaatcgggcgaaccgccagacggcgcgccaggacacctcgccgcccgctggcacagcaccttcgccgagatgaagaggaagcggcaacttgagcgtgacaaagcaatggtgccccgcattccgtcgccttcaacaggcgcaagattggaagactatacgcgcgacccgcgtgaagaggatgctgccgaccttcatcccgctctgcaggcgctgacgcgcctcgccgagccttcagtggaggttgtgttgctgcccgcgaactcccccttggatgcggcagcggacgctgttccctccctggcaacttgcagggaacttctccgtcactccgtctccatcactgccgctgatgttgtacatctattgctcgcacttcccgtgccccacccgtggaagcgctccggactgttacgccgcttgcggctgctctctctcgatgaaaacaacgagtgccgggtgggaaatgggatactgcggtatgacaccagcctcggtttgcaaatcatccgtctctaacgaaggaggtgcccatgtcagagtcgttctcgttcaacctcctcgatgaaccgtggataccgtgcctgaacaatgacgggaagctccgtcgaatcggcgtcagagaggcacttacgcaagcgggcacaatccggcaaatcgcggcaagcaatcccatggatcggctagcgatcctccggttcctgctggcattgctgtattggtgtaaggggaatccgccaacagaagcggagagtgcgcccgatgactcgtttcccacggaatggttcgcgaagctggaccagaacagggattgcttcaacctgctcggggagggaagaaggttttatcagtacaggggaaaacgcgaaatgccgctcacggcaaactatctggtccacgagatacccacgggcaccaatctctggcacttccgacacgccaccgatggagtggatggcctttgtcctgcctgctgcgctttgggcctgttgcggctgccgttgtttgcaacgtccggggggagcggcaagcctccaggcatcaacatgaaacccccactttatgtcatacctgtcggcgactcccttgcaaagacgctgcggctctcttggtgctccgcgccgagtctgggaacgccggcatgggagaagccggacatctcgttgccaaagactggcgaggtgccgttgttaacaggactatcgtggctgcccaggcgggtatggctcggcaatccagaggaatccgaagccacctgcatctcgtgtggtcgcaagaatcggttgataacatccagcgttttcgccggcatcggcagtatgaaaaccgatgatgaaactcccaaccgcctttggcgggacccccatgtcatctatgataacagcggcaagagcaaagtcacgaccctacacgctaggaacgccctgggcgccaccgatgcgggggctggccagtgggcgtcaatcgtagctgggatgttccaacagcaaagcgcccccgctgcaacggacttgcccaatcaggacagttgggccgagggtggcaaatacagcatatgggtcgtcggcttctccaccgtgcagaacgacaagtatctggaggctattgagtacacactgtctctccctgcctcagcaggtcaatctgtgaccgctgtgcaactcttggaacgatggcaagaagagaacgcacgccttgcccgcaaagtctggccgccagatgagcaatggtcttaccgcaagcatcccgagattgcgtcagccatcgccgccgttcgtccccatgtggaaggcaaggtctctgccaaagtgggggagctgcttaccggcggcgatgccgcatggctggaggccgccagcgagtatcgccccatgatggaggcagtcgccaggtctctctacccaggctttacgactgcggctgttgaatggcggaagcacattgctgacacgctgccggatatgaccaccacagggcctacaaaaaaggccgcaagaaagaaaggaggcgcgccatgagcccaacacccacggagcagtacattggcgttctggcaaagctgaagcctggcgacctggggctgctacgcagccatgccgggcaagggctggacaaatcggtgcatgggtttgacctgttcacgggcctttggtggccgctgcggcagagaaaccaagcagcgcctgaacgcgaggtgacctggctgatcgtgaagctttacgctcgctgtccgctcctccagtcgcctggcgataccctcgcccggcaactggcccgttgccagccaagcaaggagccagagcgtcagcgctaccggcagcgctttgaccggatgctcatgctgcccatcatcaagatggagcctgtgctgcaaggggcagtcgccatgatcgcctcaaaggatctcaagcttgattgggtgaaactcacggatgacctgtccatctgggaacgggaacgtacccggctcaggtgggcggaacaatttctggaaagcaacgaaaggacatagccatgctcattgaaatccacatcatccagaaccacagcccaaacaacctcaatcgggacgacctcggcgcgcccaagacctgctacttcggcggcgtcctgcgctcacgcatctccagccaggccatcaaacgcagcatccgcatgagcgatgagttcagcaagctacttggcggcgttcgcacgcgacagttggcgaagctgatcgcagagaacgtaactggcaaggcggatgtccagaatcgcgctgcacgaattctccaagcatgtggcatcgcaccgaaagatgagtcaagaagcgatatgctcgtttacacgactagggaggcggttgcccaaatggctgcgctgctacagaacgacgaaggcaagaccgatgcacagctacaaagtgatttcgggatgctcattagggaacgggtggctgtgccggacatggccctcagtggaagaatgctggaaaccggtgtcctgaaagacacaactgtagaagcggccctccaggtagcccacgccatttccacccatgaagcccgcccggaggtggactactacgtggcgaaggacgatgtcccaggagaggatgccggggcaggatatgtagacgaagcgatgttcgcttccgcctgcttctacaagtacttctctatccactgggaacaattggtcaagaacttgaaagcctatggggacaatcacaaagagcttgccgcccataccgtcggcgcgttcattcgcggggcggcgctggtcaatccctctggcaagcagaacagccatgcctcgcataataagcctgacggcatactgatcgagataagggacttccccattagctacgccaacgccttcgccaatccggtgtcgcacggcgagcgcgacgttatctcgcaaagcatcgcccagttgggccagtacgcccatgacctggataccggctacggcagaccgcagaagcgcttctggttctccccgaatggccgctacccgttaacggtgcgggacgataaggaggataaggacgtcgccgacaagaacctgacgtcattggaggacctggtacgcgctgtcaccgcagagatcggctacgactgggacgcggtccagagcattgccttgaatgggagatgagccgtatgagcgccaacaccctgtttctccggctggaaggccccatgcaagcctggggagaccaggaatccaagttcgtggtgcgacgaacagccgaggcccccaccaaatcgggagtgatcggtatgctgtgcgccgcgctgggcgtctcgcgccccgatgcctcctatgagtggcttccgaggttgagcgccctgcgcatgggagtccggaccgaccggccgggcgtccgctggtgggactaccacaccgtcggcgcggggatgcagatgcgcatcgccgaaggcaagaccaaagccggcgcgatgctgacgcggcgggagtacctctgcgacgccagctttctggtcgctctgcagggtgagccgacactggtcgcccgcctcgaggcggcgctgcgaaaaccccactggacaccctacttggggagaaaggcctgcccgccatcccgcccgctgttggagcgtcccgccgaggagtctggcgacctgctgactgcactttgctccgtcccgtggcgaaagcggctcgcaacagaccgtgtgccggcaaccgtggagtgtctgctcgactggcagtcgtcgctggaggagccagtagcacccgccgacgccctcgtctggtacgatgtgccgctcacttttgagcctcctgcacacgcccctagattcgtcatgcgccgccggttgcgcgtcggtatcggaggcgaggtcagcatagccgacaagcctgcccagaatcggacgctatcgcctccgcgaccccgcgcggactaccggaataccgagtatcgcaatgcccgcgctaagcgcctgaacgacgactatggcctctgcgtgttctgcaaaagtcccgccaccaccgtgcagcacatcacctaccgtcgggcgggaggcgacgaaacccaggacgacctccgctcactctgccggctttgtcatgacgcggtgacgatgatcgaatacggctatggcatgggcatggatcgcatcaaccctgaggagctacgctggcgggaagacattatccagaagcgtcaagagatcatccaattccgctcgctggagacccgacgacgtcgcctcagccctgaggaggtgtagtagccatgtacctatcgtgcctcttgatcaacgtcggagataacccggaccgcccgcgccccggtcggctgtggctccgcaacctctatcgagttcaccagcgcctgtgcatggcgtttccgactgcatccagggtgtccgctgatccggacttccttcagcctttcaacccggacgatttcgggccaaagccagtacatgccgctcggagcatggatgctggcttcctgttccgcattgaccctcaacccagtggccgagttgtgattcttgtgcagtctgcaagcatgcccgactgggactacgctttccataatgcggactatctcctggcggctccccccagcacgaaagcatttgaaccgtccgccacaaaggagcagcgtctccaattccgtcttgtggcgaatcccacaaagcgattgagccagaactcacgggaaaaggacggccaacccgtcaaatcggaatggattgggaaacgagtccccgttccaaccgaaaagctagaggagtggctagcgcagcgagctgcacctgccggattccgcgtagagaagctccttagcgtacaacctggttacgtccacgcctccaaggatggcggcggtgggggaaaccgacttcgctccgtccggtatgacggtatcctccaagtcaccgatcccgcacctttccaagataccctcatacgcggcattggtcccgcgaaggcttttggctgtggtctcctgtcagtcgccccgccagggaggtgaaccatgaaagacttgcacgcgttacccaagatacgggatagctggagctacttgtacgtggagcattgccgcatcgatcaggaggacaaggccattgccctgcacgatgcccagggcgtcaccgccgtcccctgcgcgagtctgtcgttactgatgctcgggccgggcaccagaatcacccatgccgccatccatgtcctggcggagaacggctgcatggtcttatggacgggggaagagggcgtgcgctgttatgccgtcggactgggcgaaacccggtcggcccggcgcctgctccatcaggcctacctctgtacccacccttccctgcggcttcaggtggcgcggcgactttatgagatgcggtttcccgatcccctggaccctggcctcagcttgcagcaaatacggggtaaagagggcatccgtgtccgggaggcatatgcccaggccagccgcgccaccgggatcccctggtccggacgggcctaccgacggggggactggagtgtcgccgaccctatgaaccgggcgctctccgcagccaatagctgtctctacggaatttgtcatgccgccatcgtctctgccgggtactccccagccctgggtttcgtccatacgggcaagatgctctccttcgtttacgacatcgccgatctctacaaggtcgacttcagcatcccgattgcctttggggctgccgaagaagggtttcatcaactggagacgcgggtgcggcaggcaagcagggatgccttccacaaacagcggctcttggcccgtataatccccgatattgatcgcgccctcggcgtgaagcctaccgagcaggatgaggacagcgcctacgacgcagacgacgccctccccggcggcctgtgggacccggaagtgggatcggtaccggggggaacaagtcatgcgagcctagcgaggtgaaatgatgctggtgctaagacttgagcgggttcctgcatcgttgcggggtgaactgacacggtggctgctggaggcctccaccgggatgtttgtgggcagggtgtctgccatggtgcgcgaacagctatggacgctggtgtgccgcagcctgaagggaggtggagcggtacttgcctatagcacggacaatgagcaggggttcgcgctgcggacatggggcactccgtcgcgggaggtggtagacttcgaggggctttcgctggtgcgggtgccgcgttctgtgcctgaggagtagtgtttttctatgtattttccagtgttgtccccacacgcgtgggggtgaaccgtcatcgtgactgttgctaatttgaacttctacgttgtccccacacgcgtgggggtgaaccgatatagtgctaatgagcaagtctcaggtttaagttgtccccacacgcgtgggggtgaaccgtgggcccagcgcgtcaccgaggctgccaaccagttgtccccacacgcgtgggggtgaaccggtaagctggtcggtcaggtcgctggcgaagccgttgtccccacacgcgtgggggtgaaccgggggcacggcatgacgtgcaaacactgcgaccgttgtccccacacgcgtgggggtgaaccggagtacgctgcgcagcacgggtggacgccgcagttgtccccacacgcgtgggggtgaaccgggcacgacggtcaacgtagacgcaagatcggcgttgtccccacacgcgtgggggtgaaccgagaggaagtccttcttccgccgattggctgaggttgtccccacacgcgtgggggtgaaccggttggcccctgtaagatcggccctcaaccccggttgtccccacacgcgtgggggtgaaccggacctacaaacggaagcggtgcgaaacatcatgttgtccccacacgcgtgggggtgaggtaaaatggaggagagtcgaccattcactatccccacatagtatcacctgcaatccaggccggctgtcgcattccgtgaggataaccgccgggaggcagcatggctacaaggtgctgaggcttcctctcagcaaagggctcagcgatcgtccacggtttaggttaatgccccgggggtacgcacctctaacggaacgaacgtgtgctaagcgttggcgatctctgcgtcgatcgccaggacccgagcgtaagcctggaggtggacgaacgccccacgcgccaagaggagctcaccaagtccctcttgccgcagaccacgggaaagaaggaaactaccgaaggtgctgtggccccagcccaactcgaaggtctcgttcgccttctggaggtaacccaaggctgttcggaaggaacgctcagcctcccccgcgtccccgatgcgctcgttgaccagcgcacgcaccaagttggtcgtgcccaaggagtacgggtcatctgatgacgcgttttctaccgcccgctcggcagtttccctcgcctcctcgacttgcccaacgcccagcagcgcttgagccaatgtccggtagacctcgggagcgacgcttgtaagcccgtgctcacggcagatgatctccgcctgacgaagctcggctatagcgctctcgaaaacccctagttcgaggtcgacttgggcccggaggagcaggctgcgagaatacatcgcgctatctccagatccgccggtcaagcccacgcctcgttcggcg

SEQ ID NO: 1090 - DNA, 105511 bp, Artificial Sequence
  Synthetic Oligonucleotide
  misc_feature (1)..(97388): n is a, c, g, or t
nnnnnnnnnnnnnnnnnnnnnnnnnnnnnnnnnnnnnnnnnnnnnnnnnnnnnnnnnnnnnnnnnnnnnnnnnnnnnnnnnnnnnnnnnnnnnnnnnnnnnnnnnnnnnnnnnnnnnnnnnnnnnnnnnnnnnnnnnnnnnnnnnnnnnnnnnnnnnnnnnnnnnnnnnnnnnnnnnnnnnnnnnnnnnnnnnnnnnnnnnnnnnnnnnnnnnnnnnnnnnnnnnnnnnnnnnnnnnnnnnnnnnnnnnnnnnnnnnnnnnnnnnnnnnnnnnnnnnnnnnnnnnnnnnnnnnnnnnnnnnnnnnnnnnnnnnnnnnnnnnnnnnnnnnnnnnnnnnnnnnnnnnnnnnnnnnnnnnnnnnnnnnnnnnnnnnnnnnnnnnnnnnnnnnnnnnnnnnnnnnnnnnnnnnnnnnnnnnnnnnnnnnnnnnnnnnnnnnnnnnnnnnnnnnnnnnnnnnnnnnnnnnnnnnnnnnnnnnnnnnnnnnnnnnnnnnnnnnnnnnnnnnnnnnnnnnnnnnnnnnnnnnnnnnnnnnnnnnnnnnnnnnnnnnnnnnnnnnnnnnnnnnnnnnnnnnnnnnnnnnnnnnnnnnnnnnnnnnnnnnnnnnnnnnnnnnnnnnnnnnnnnnnnnnnnnnnnnnnnnnnnnnnnnnnnnnnnnnnnnnnnnnnnnnnnnnnnnnnnnnnnnnnnnnnnnnnnnnnnnnnnnnnnnnnnnnnnnnnnnnnnnnnnnnnnnnnnnnnnnnnnnnnnnnnnnnnnnnnnnnnnnnnnnnnnnnnnnnnnnnnnnnnnnnnnnnnnnnnnnnnnnnnnnnnnnnnnnnnnnnnnnnnnnnnnnnnnnnnnnnnnnnnnnnnnnnnnnnnnnnnnnnnnnnnnnnnnnnnnnnnnnnnnnnnnnnnnnnnnnnnnnnnnnnnnnnnnnnnnnnnnnnnnnnnnnnnnnnnnnnnnnnnnnnnnnnnnnnnnnnnnnnnnnnnnnnnnnnnnnnnnnnnnnnnnnnnnnnnnnnnnnnnnnnnnnnnnnnnnnnnnnnnnnnnnnnnnnnnnnnnnnnnnnnnnnnnnnnnnnnnnnnnnnnnnnnnnnnnnnnnnnnnnnnnnnnnnnnnnnnnnnnnnnnnnnnnnnnnnnnnnnnnnnnnnnnnnnnnnnnnnnnnnnnnnnnnnnnnnnnnnnnnnnnnnnnnnnnnnnnnnnnnnnnnnnnnnnnnnnnnnnnnnnnnnnnnnnnnnnnnnnnnnnnnnnnnnnnnnnnnnnnnnnnnnnnnnnnnnnnnnnnnnnnnnnnnnnnnnnnnnnnnnnnnnnnnnnnnnnnnnnnnnnnnnnnnnnnnnnnnnnnnnnnnnnnnnnnnnnnnnnnnnnnnnnnnnnnnnnnnnnnnnnnnnnnnnnnnnnnnnnnnnnnnnnnnnnnnnnnnnnnnnnnnnnnnnnnnnnnnnnnnnnnnnnnnnnnnnnnnnnnnnnnnnnnnnnnnnnnnnnnnnnnnnnnnnnnnnnnnnnnnnnnnnnnnnnnnnnnnnnnnnnnnnnnnnnnnnnnnnnnnnnnnnnnnnnnnnnnnnnnnnnnnnnnnnnnnnnnnnnnnnnnnnnnnnnnnnnnnnnnnnnnnnnnnnnnnnnnnnnnnnnnnnnnnnnnnnnnnnnnnnnnnnnnnnnnnnnnnnnnnnnnnnnnnnnnnnnnnnnnnnnnnnnnnnnnnnnnnnnnnnnnnnnnnnnnnnnnnnnnnnnnnnnnnnnnnnnnnnnnnnnnnnnnnnnnnnnnnnnnnnnnnnnnnnnnnnnnnnnnnnnnnnnnnnnnnnnnnnnnnnnnnnnnnnnnnnnnnnnnnnnnnnnnnnnnnnnnnnnnnnnnnnnnnnnnnnnnnnnnnnnnnnnnnnnnnnnnnnnnnnnnnnnnnnnnnnnnnnnnnnnnnnnnnnnnnnnnnnnnnnnnnnnnnnnnnnnnnnnnnnnnnnnnnnnnnnnnnnnnnnnnnnnnnnnnnnnnnnnnnnnnnnnnnnnnnnnnnnnnnnnnnnnnnnnnnnnnnnnnnnnnnnnnnnnnnnnnnnnnnnnnnnnnnnnnnnnnnnnnnnnnnnnnnnnnnnnnnnnnnnnnnnnnnnnnnnnnnnnnnnnnnnnnnnnnnnnnnnnnnnnnnnnnnnnnnnnnnnnnnnnnnnnnnnnnnnnnnnnnnnnnnnnnnnnnnnnnnnnnnnnnnnnnnnnnnnnnnnnnnnnnnnnnnnnnnnnnnnnnnnnnnnnnnnnnnnnnnnnnnnnnnnnnnnnnnnnnnnnnnnnnnnnnnnnnnnnnnnnnnnnnnnnnnnnnnnnnnnnnnnnnnnnnnnnnnnnnnnnnnnnnnnnnnnnnnnnnnnnnnnnnnnnnnnnnnnnnnnnnnnnnnnnnnnnnnnnnnnnnnnnnnnnnnnnnnnnnnnnnnnnnnnnnnnnnnnnnnnnnnnnnnnnnnnnnnnnnnnnnnnnnnnnnnnnnnnnnnnnnnnnnnnnnnnnnnnnnnnnnnnnnnnnnnnnnnnnnnnnnnnnnnnnnnnnnnnnnnnnnnnnnnnnnnnnnnnnnnnnnnnnnnnnnnnnnnnnnnnnnnnnnnnnnnnnnnnnnnnnnnnnnnnnnnnnnnnnnnnnnnnnnnnnnnnnnnnnnnnnnnnnnnnnnnnnnnnnnnnnnnnnnnnnnnnnnnnnnnnnnnnnnnnnnnnnnnnnnnnnnnnnnnnnnnnnnnnnnnnnnnnnnnnnnnnnnnnnnnnnnnnnnnnnnnnnnnnnnnnnnnnnnnnnnnnnnnnnnnnnnnnnnnnnnnnnnnnnnnnnnnnnnnnnnnnnnnnnnnnnnnnnnnnnnnnnnnnnnnnnnnnnnnnnnnnnnnnnnnnnnnnnnnnnnnnnnnnnnnnnnnnnnnnnnnnnnnnnnnnnnnnnnnnnnnnnnnnnnnnnnnnnnnnnnnnnnnnnnnnnnnnnnnnnnnnnnnnnnnnnnnnnnnnnnnnnnnnnnnnnnnnnnnnnnnnnnnnnnnnnnnnnnnnnnnnnnnnnnnnnnnnnnnnnnnnnnnnnnnnnnnnnnnnnnnnnnnnnnnnnnnnnnnnnnnnnnnnnnnnnnnnnnnnnnnnnnnnnnnnnnnnnnnnnnnnnnnnnnnnnnnnnnnnnnnnnnnnnnnnnnnnnnnnnnnnnnnnnnnnnnnnnnnnnnnnnnnnnnnnnnnnnnnnnnnnnnnnnnnnnnnnnnnnnnnnnnnnnnnnnnnnnnnnnnnnnnnnnnnnnnnnnnnnnnnnnnnnnnnnnnnnnnnnnnnnnnnnnnnnnnnnnnnnnnnnnnnnnnnnnnnnnnnnnnnnnnnnnnnnnnnnnnnnnnnnnnnnnnnnnnnnnnnnnnnnnnnnnnnnnnnnnnnnnnnnnnnnnnnnnnnnnnnnnnnnnnnnnnnnnnnnnnnnnnnnnnnnnnnnnnnnnnnnnnnnnnnnnnnnnnnnnnnnnnnnnnnnnnnnnnnnnnnnnnnnnnnnnnnnnnnnnnnnnnnnnnnnnnnnnnnnnnnnnnnnnnnnnnnnnnnnnnnnnnnnnnnnnnnnnnnnnnnnnnnnnnnnnnnnnnnnnnnnnnnnnnnnnnnnnnnnnnnnnnnnnnnnnnnnnnnnnnnnnnnnnnnnnnnnnnnnnnnnnnnnnnnnnnnnnnnnnnnnnnnnnnnnnnnnnnnnnnnnnnnnnnnnnnnnnnnnnnnnnnnnnnnnnnnnnnnnnnnnnnnnnnnnnnnnnnnnnnnnnnnnnnnnnnnnnnnnnnnnnnnnnnnnnnnnnnnnnnnnnnnnnnnnnnnnnnnnnnnnnnnnnnnnnnnnnnnnnnnnnnnnnnnnnnnnnnnnnnnnnnnnnnnnnnnnnnnnnnnnnnnnnnnnnnnnnnnnnnnnnnnnnnnnnnnnnnnnnnnnnnnnnnnnnnnnnnnnnnnnnnnnnnnnnnnnnnnnnnnnnnnnnnnnnnnnnnnnnnnnnnnnnnnnnnnnnnnnnnnnnnnnnnnnnnnnnnnnnnnnnnnnnnnnnnnnnnnnnnnnnnnnnnnnnnnnnnnnnnnnnnnnnnnnnnnnnnnnnnnnnnnnnnnnnnnnnnnnnnnnnnnnnnnnnnnnnnnnnnnnnnnnnnnnnnnnnnnnnnnnnnnnnnnnnnnnnnnnnnnnnnnnnnnnnnnnnnnnnnnnnnnnnnnnnnnnnnnnnnnnnnnnnnnnnnnnnnnnnnnnnnnnnnnnnnnnnnnnnnnnnnnnnnnnnnnnnnnnnnnnnnnnnnnnnnnnnnnnnnnnnnnnnnnnnnnnnnnnnnnnnnnnnnnnnnnnnnnnnnnnnnnnnnnnnnnnnnnnnnnnnnnnnnnnnnnnnnnnnnnnnnnnnnnnnnnnnnnnnnnnnnnnnnnnnnnnnnnnnnnnnnnnnnnnnnnnnnnnnnnnnnnnnnnnnnnnnnnnnnnnnnnnnnnnnnnnnnnnnnnnnnnnnnnnnnnnnnnnnnnnnnnnnnnnnnnnnnnnnnnnnnnnnnnnnnnnnnnnnnnnnnnnnnnnnnnnnnnnnnnnnnnnnnnnnnnnnnnnnnnnnnnnnnnnnnnnnnnnnnnnnnnnnnnnnnnnnnnnnnnnnnnnnnnnnnnnnnnnnnnnnnnnnnnnnnnnnnnnnnnnnnnnnnnnnnnnnnnnnnnnnnnnnnnnnnnnnnnnnnnnnnnnnnnnnnnnnnnnnnnnnnnnnnnnnnnnnnnnnnnnnnnnnnnnnnnnnnnnnnnnnnnnnnnnnnnnnnnnnnnnnnnnnnnnnnnnnnnnnnnnnnnnnnnnnnnnnnnnnnnnnnnnnnnnnnnnnnnnnnnnnnnnnnnnnnnnnnnnnnnnnnnnnnnnnnnnnnnnnnnnnnnnnnnnnnnnnnnnnnnnnnnnnnnnnnnnnnnnnnnnnnnnnnnnnnnnnnnnnnnnnnnnnnnnnnnnnnnnnnnnnnnnnnnnnnnnnnnnnnnnnnnnnnnnnnnnnnnnnnnnnnnnnnnnnnnnnnnnnnnnnnnnnnnnnnnnnnnnnnnnnnnnnnnnnnnnnnnnnnnnnnnnnnnnnnnnnnnnnnnnnnnnnnnnnnnnnnnnnnnnnnnnnnnnnnnnnnnnnnnnnnnnnnnnnnnnnnnnnnnnnnnnnnnnnnnnnnnnnnnnnnnnnnnnnnnnnnnnnnnnnnnnnnnnnnnnnnnnnnnnnnnnnnnnnnnnnnnnnnnnnnnnnnnnnnnnnnnnnnnnnnnnnnnnnnnnnnnnnnnnnnnnnnnnnnnnnnnnnnnnnnnnnnnnnnnnnnnnnnnnnnnnnnnnnnnnnnnnnnnnnnnnnnnnnnnnnnnnnnnnnnnnnnnnnnnnnnnnnnnnnnnnnnnnnnnnnnnnnnnnnnnnnnnnnnnnnnnnnnnnnnnnnnnnnnnnnnnnnnnnnnnnnnnnnnnnnnnnnnnnnnnnnnnnnnnnnnnnnnnnnnnnnnnnnnnnnnnnnnnnnnnnnnnnnnnnnnnnnnnnnnnnnnnnnnnnnnnnnnnnnnnnnnnnnnnnnnnnnnnnnnnnnnnnnnnnnnnnnnnnnnnnnnnnnnnnnnnnnnnnnnnnnnnnnnnnnnnnnnnnnnnnnnnnnnnnnnnnnnnnnnnnnnnnnnnnnnnnnnnnnnnnnnnnnnnnnnnnnnnnnnnnnnnnnnnnnnnnnnnnnnnnnnnnnnnnnnnnnnnnnnnnnnnnnnnnnnnnnnnnnnnnnnnnnnnnnnnnnnnnnnnnnnnnnnnnnnnnnnnnnnnnnnnnnnnnnnnnnnnnnnnnnnnnnnnnnnnnnnnnnnnnnnnnnnnnnnnnnnnnnnnnnnnnnnnnnnnnnnnnnnnnnnnnnnnnnnnnnnnnnnnnnnnnnnnnnnnnnnnnnnnnnnnnnnnnnnnnnnnnnnnnnnnnnnnnnnnnnnnnnnnnnnnnnnnnnnnnnnnnnnnnnnnnnnnnnnnnnnnnnnnnnnnnnnnnnnnnnnnnnnnnnnnnnnnnnnnnnnnnnnnnnnnnnnnnnnnnnnnnnnnnnnnnnnnnnnnnnnnnnnnnnnnnnnnnnnnnnnnnnnnnnnnnnnnnnnnnnnnnnnnnnnnnnnnnnnnnnnnnnnnnnnnnnnnnnnnnnnnnnnnnnnnnnnnnnnnnnnnnnnnnnnnnnnnnnnnnnnnnnnnnnnnnnnnnnnnnnnnnnnnnnnnnnnnnnnnnnnnnnnnnnnnnnnnnnnnnnnnnnnnnnnnnnnnnnnnnnnnnnnnnnnnnnnnnnnnnnnnnnnnnnnnnnnnnnnnnnnnnnnnnnnnnnnnnnnnnnnnnnnnnnnnnnnnnnnnnnnnnnnnnnnnnnnnnnnnnnnnnnnnnnnnnnnnnnnnnnnnnnnnnnnnnnnnnnnnnnnnnnnnnnnnnnnnnnnnnnnnnnnnnnnnnnnnnnnnnnnnnnnnnnnnnnnnnnnnnnnnnnnnnnnnnnnnnnnnnnnnnnnnnnnnnnnnnnnnnnnnnnnnnnnnnnnnnnnnnnnnnnnnnnnnnnnnnnnnnnnnnnnnnnnnnnnnnnnnnnnnnnnnnnnnnnnnnnnnnnnnnnnnnnnnnnnnnnnnnnnnnnnnnnnnnnnnnnnnnnnnnnnnnnnnnnnnnnnnnnnnnnnnnnnnnnnnnnnnnnnnnnnnnnnnnnnnnnnnnnnnnnnnnnnnnnnnnnnnnnnnnnnnnnnnnnnnnnnnnnnnnnnnnnnnnnnnnnnnnnnnnnnnnnnnnnnnnnnnnnnnnnnnnnnnnnnnnnnnnnnnnnnnnnnnnnnnnnnnnnnnnnnnnnnnnnnnnnnnnnnnnnnnnnnnnnnnnnnnnnnnnnnnnnnnnnnnnnnnnnnnnnnnnnnnnnnnnnnnnnnnnnnnnnnnnnnnnnnnnnnnnnnnnnnnnnnnnnnnnnnnnnnnnnnnnnnnnnnnnnnnnnnnnnnnnnnnnnnnnnnnnnnnnnnnnnnnnnnnnnnnnnnnnnnnnnnnnnnnnnnnnnnnnnnnnnnnnnnnnnnnnnnnnnnnnnnnnnnnnnnnnnnnnnnnnnnnnnnnnnnnnnnnnnnnnnnnnnnnnnnnnnnnnnnnnnnnnnnnnnnnnnnnnnnnnnnnnnnnnnnnnnnnnnnnnnnnnnnnnnnnnnnnnnnnnnnnnnnnnnnnnnnnnnnnnnnnnnnnnnnnnnnnnnnnnnnnnnnnnnnnnnnnnnnnnnnnnnnnnnnnnnnnnnnnnnnnnnnnnnnnnnnnnnnnnnnnnnnnnnnnnnnnnnnnnnnnnnnnnnnnnnnnnnnnnnnnnnnnnnnnnnnnnnnnnnnnnnnnnnnnnnnnnnnnnnnnnnnnnnnnnnnnnnnnnnnnnnnnnnnnnnnnnnnnnnnnnnnnnnnnnnnnnnnnnnnnnnnnnnnnnnnnnnnnnnnnnnnnnnnnnnnnnnnnnnnnnnnnnnnnnnnnnnnnnnnnnnnnnnnnnnnnnnnnnnnnnnnnnnnnnnnnnnnnnnnnnnnnnnnnnnnnnnnnnnnnnnnnnnnnnnnnnnnnnnnnnnnnnnnnnnnnnnnnnnnnnnnnnnnnnnnnnnnnnnnnnnnnnnnnnnnnnnnnnnnnnnnnnnnnnnnnnnnnnnnnnnnnnnnnnnnnnnnnnnnnnnnnnnnnnnnnnnnnnnnnnnnnnnnnnnnnnnnnnnnnnnnnnnnnnnnnnnnnnnnnnnnnnnnnnnnnnnnnnnnnnnnnnnnnnnnnnnnnnnnnnnnnnnnnnnnnnnnnnnnnnnnnnnnnnnnnnnnnnnnnnnnnnnnnnnnnnnnnnnnnnnnnnnnnnnnnnnnnnnnnnnnnnnnnnnnnnnnnnnnnnnnnnnnnnnnnnnnnnnnnnnnnnnnnnnnnnnnnnnnnnnnnnnnnnnnnnnnnnnnnnnnnnnnnnnnnnnnnnnnnnnnnnnnnnnnnnnnnnnnnnnnnnnnnnnnnnnnnnnnnnnnnnnnnnnnnnnnnnnnnnnnnnnnnnnnnnnnnnnnnnnnnnnnnnnnnnnnnnnnnnnnnnnnnnnnnnnnnnnnnnnnnnnnnnnnnnnnnnnnnnnnnnnnnnnnnnnnnnnnnnnnnnnnnnnnnnnnnnnnnnnnnnnnnnnnnnnnnnnnnnnnnnnnnnnnnnnnnnnnnnnnnnnnnnnnnnnnnnnnnnnnnnnnnnnnnnnnnnnnnnnnnnnnnnnnnnnnnnnnnnnnnnnnnnnnnnnnnnnnnnnnnnnnnnnnnnnnnnnnnnnnnnnnnnnnnnnnnnnnnnnnnnnnnnnnnnnnnnnnnnnnnnnnnnnnnnnnnnnnnnnnnnnnnnnnnnnnnnnnnnnnnnnnnnnnnnnnnnnnnnnnnnnnnnnnnnnnnnnnnnnnnnnnnnnnnnnnnnnnnnnnnnnnnnnnnnnnnnnnnnnnnnnnnnnnnnnnnnnnnnnnnnnnnnnnnnnnnnnnnnnnnnnnnnnnnnnnnnnnnnnnnnnnnnnnnnnnnnnnnnnnnnnnnnnnnnnnnnnnnnnnnnnnnnnnnnnnnnnnnnnnnnnnnnnnnnnnnnnnnnnnnnnnnnnnnnnnnnnnnnnnnnnnnnnnnnnnnnnnnnnnnnnnnnnnnnnnnnnnnnnnnnnnnnnnnnnnnnnnnnnnnnnnnnnnnnnnnnnnnnnnnnnnnnnnnnnnnnnnnnnnnnnnnnnnnnnnnnnnnnnnnnnnnnnnnnnnnnnnnnnnnnnnnnnnnnnnnnnnnnnnnnnnnnnnnnnnnnnnnnnnnnnnnnnnnnnnnnnnnnnnnnnnnnnnnnnnnnnnnnnnnnnnnnnnnnnnnnnnnnnnnnnnnnnnnnnnnnnnnnnnnnnnnnnnnnnnnnnnnnnnnnnnnnnnnnnnnnnnnnnnnnnnnnnnnnnnnnnnnnnnnnnnnnnnnnnnnnnnnnnnnnnnnnnnnnnnnnnnnnnnnnnnnnnnnnnnnnnnnnnnnnnnnnnnnnnnnnnnnnnnnnnnnnnnnnnnnnnnnnnnnnnnnnnnnnnnnnnnnnnnnnnnnnnnnnnnnnnnnnnnnnnnnnnnnnnnnnnnnnnnnnnnnnnnnnnnnnnnnnnnnnnnnnnnnnnnnnnnnnnnnnnnnnnnnnnnnnnnnnnnnnnnnnnnnnnnnnnnnnnnnnnnnnnnnnnnnnnnnnnnnnnnnnnnnnnnnnnnnnnnnnnnnnnnnnnnnnnnnnnnnnnnnnnnnnnnnnnnnnnnnnnnnnnnnnnnnnnnnnnnnnnnnnnnnnnnnnnnnnnnnnnnnnnnnnnnnnnnnnnnnnnnnnnnnnnnnnnnnnnnnnnnnnnnnnnnnnnnnnnnnnnnnnnnnnnnnnnnnnnnnnnnnnnnnnnnnnnnnnnnnnnnnnnnnnnnnnnnnnnnnnnnnnnnnnnnnnnnnnnnnnnnnnnnnnnnnnnnnnnnnnnnnnnnnnnnnnnnnnnnnnnnnnnnnnnnnnnnnnnnnnnnnnnnnnnnnnnnnnnnnnnnnnnnnnnnnnnnnnnnnnnnnnnnnnnnnnnnnnnnnnnnnnnnnnnnnnnnnnnnnnnnnnnnnnnnnnnnnnnnnnnnnnnnnnnnnnnnnnnnnnnnnnnnnnnnnnnnnnnnnnnnnnnnnnnnnnnnnnnnnnnnnnnnnnnnnnnnnnnnnnnnnnnnnnnnnnnnnnnnnnnnnnnnnnnnnnnnnnnnnnnnnnnnnnnnnnnnnnnnnnnnnnnnnnnnnnnnnnnnnnnnnnnnnnnnnnnnnnnnnnnnnnnnnnnnnnnnnnnnnnnnnnnnnnnnnnnnnnnnnnnnnnnnnnnnnnnnnnnnnnnnnnnnnnnnnnnnnnnnnnnnnnnnnnnnnnnnnnnnnnnnnnnnnnnnnnnnnnnnnnnnnnnnnnnnnnnnnnnnnnnnnnnnnnnnnnnnnnnnnnnnnnnnnnnnnnnnnnnnnnnnnnnnnnnnnnnnnnnnnnnnnnnnnnnnnnnnnnnnnnnnnnnnnnnnnnnnnnnnnnnnnnnnnnnnnnnnnnnnnnnnnnnnnnnnnnnnnnnnnnnnnnnnnnnnnnnnnnnnnnnnnnnnnnnnnnnnnnnnnnnnnnnnnnnnnnnnnnnnnnnnnnnnnnnnnnnnnnnnnnnnnnnnnnnnnnnnnnnnnnnnnnnnnnnnnnnnnnnnnnnnnnnnnnnnnnnnnnnnnnnnnnnnnnnnnnnnnnnnnnnnnnnnnnnnnnnnnnnnnnnnnnnnnnnnnnnnnnnnnnnnnnnnnnnnnnnnnnnnnnnnnnnnnnnnnnnnnnnnnnnnnnnnnnnnnnnnnnnnnnnnnnnnnnnnnnnnnnnnnnnnnnnnnnnnnnnnnnnnnnnnnnnnnnnnnnnnnnnnnnnnnnnnnnnnnnnnnnnnnnnnnnnnnnnnnnnnnnnnnnnnnnnnnnnnnnnnnnnnnnnnnnnnnnnnnnnnnnnnnnnnnnnnnnnnnnnnnnnnnnnnnnnnnnnnnnnnnnnnnnnnnnnnnnnnnnnnnnnnnnnnnnnnnnnnnnnnnnnnnnnnnnnnnnnnnnnnnnnnnnnnnnnnnnnnnnnnnnnnnnnnnnnnnnnnnnnnnnnnnnnnnnnnnnnnnnnnnnnnnnnnnnnnnnnnnnnnnnnnnnnnnnnnnnnnnnnnnnnnnnnnnnnnnnnnnnnnnnnnnnnnnnnnnnnnnnnnnnnnnnnnnnnnnnnnnnnnnnnnnnnnnnnnnnnnnnnnnnnnnnnnnnnnnnnnnnnnnnnnnnnnnnnnnnnnnnnnnnnnnnnnnnnnnnnnnnnnnnnnnnnnnnnnnnnnnnnnnnnnnnnnnnnnnnnnnnnnnnnnnnnnnnnnnnnnnnnnnnnnnnnnnnnnnnnnnnnnnnnnnnnnnnnnnnnnnnnnnnnnnnnnnnnnnnnnnnnnnnnnnnnnnnnnnnnnnnnnnnnnnnnnnnnnnnnnnnnnnnnnnnnnnnnnnnnnnnnnnnnnnnnnnnnnnnnnnnnnnnnnnnnnnnnnnnnnnnnnnnnnnnnnnnnnnnnnnnnnnnnnnnnnnnnnnnnnnnnnnnnnnnnnnnnnnnnnnnnnnnnnnnnnnnnnnnnnnnnnnnnnnnnnnnnnnnnnnnnnnnnnnnnnnnnnnnnnnnnnnnnnnnnnnnnnnnnnnnnnnnnnnnnnnnnnnnnnnnnnnnnnnnnnnnnnnnnnnnnnnnnnnnnnnnnnnnnnnnnnnnnnnnnnnnnnnnnnnnnnnnnnnnnnnnnnnnnnnnnnnnnnnnnnnnnnnnnnnnnnnnnnnnnnnnnnnnnnnnnnnnnnnnnnnnnnnnnnnnnnnnnnnnnnnnnnnnnnnnnnnnnnnnnnnnnnnnnnnnnnnnnnnnnnnnnnnnnnnnnnnnnnnnnnnnnnnnnnnnnnnnnnnnnnnnnnnnnnnnnnnnnnnnnnnnnnnnnnnnnnnnnnnnnnnnnnnnnnnnnnnnnnnnnnnnnnnnnnnnnnnnnnnnnnnnnnnnnnnnnnnnnnnnnnnnnnnnnnnnnnnnnnnnnnnnnnnnnnnnnnnnnnnnnnnnnnnnnnnnnnnnnnnnnnnnnnnnnnnnnnnnnnnnnnnnnnnnnnnnnnnnnnnnnnnnnnnnnnnnnnnnnnnnnnnnnnnnnnnnnnnnnnnnnnnnnnnnnnnnnnnnnnnnnnnnnnnnnnnnnnnnnnnnnnnnnnnnnnnnnnnnnnnnnnnnnnnnnnnnnnnnnnnnnnnnnnnnnnnnnnnnnnnnnnnnnnnnnnnnnnnnnnnnnnnnnnnnnnnnnnnnnnnnnnnnnnnnnnnnnnnnnnnnnnnnnnnnnnnnnnnnnnnnnnnnnnnnnnnnnnnnnnnnnnnnnnnnnnnnnnnnnnnnnnnnnnnnnnnnnnnnnnnnnnnnnnnnnnnnnnnnnnnnnnnnnnnnnnnnnnnnnnnnnnnnnnnnnnnnnnnnnnnnnnnnnnnnnnnnnnnnnnnnnnnnnnnnnnnnnnnnnnnnnnnnnnnnnnnnnnnnnnnnnnnnnnnnnnnnnnnnnnnnnnnnnnnnnnnnnnnnnnnnnnnnnnnnnnnnnnnnnnnnnnnnnnnnnnnnnnnnnnnnnnnnnnnnnnnnnnnnnnnnnnnnnnnnnnnnnnnnnnnnnnnnnnnnnnnnnnnnnnnnnnnnnnnnnnnnnnnnnnnnnnnnnnnnnnnnnnnnnnnnnnnnnnnnnnnnnnnnnnnnnnnnnnnnnnnnnnnnnnnnnnnnnnnnnnnnnnnnnnnnnnnnnnnnnnnnnnnnnnnnnnnnnnnnnnnnnnnnnnnnnnnnnnnnnnnnnnnnnnnnnnnnnnnnnnnnnnnnnnnnnnnnnnnnnnnnnnnnnnnnnnnnnnnnnnnnnnnnnnnnnnnnnnnnnnnnnnnnnnnnnnnnnnnnnnnnnnnnnnnnnnnnnnnnnnnnnnnnnnnnnnnnnnnnnnnnnnnnnnnnnnnnnnnnnnnnnnnnnnnnnnnnnnnnnnnnnnnnnnnnnnnnnnnnnnnnnnnnnnnnnnnnnnnnnnnnnnnnnnnnnnnnnnnnnnnnnnnnnnnnnnnnnnnnnnnnnnnnnnnnnnnnnnnnnnnnnnnnnnnnnnnnnnnnnnnnnnnnnnnnnnnnnnnnnnnnnnnnnnnnnnnnnnnnnnnnnnnnnnnnnnnnnnnnnnnnnnnnnnnnnnnnnnnnnnnnnnnnnnnnnnnnnnnnnnnnnnnnnnnnnnnnnnnnnnnnnnnnnnnnnnnnnnnnnnnnnnnnnnnnnnnnnnnnnnnnnnnnnnnnnnnnnnnnnnnnnnnnnnnnnnnnnnnnnnnnnnnnnnnnnnnnnnnnnnnnnnnnnnnnnnnnnnnnnnnnnnnnnnnnnnnnnnnnnnnnnnnnnnnnnnnnnnnnnnnnnnnnnnnnnnnnnnnnnnnnnnnnnnnnnnnnnnnnnnnnnnnnnnnnnnnnnnnnnnnnnnnnnnnnnnnnnnnnnnnnnnnnnnnnnnnnnnnnnnnnnnnnnnnnnnnnnnnnnnnnnnnnnnnnnnnnnnnnnnnnnnnnnnnnnnnnnnnnnnnnnnnnnnnnnnnnnnnnnnnnnnnnnnnnnnnnnnnnnnnnnnnnnnnnnnnnnnnnnnnnnnnnnnnnnnnnnnnnnnnnnnnnnnnnnnnnnnnnnnnnnnnnnnnnnnnnnnnnnnnnnnnnnnnnnnnnnnnnnnnnnnnnnnnnnnnnnnnnnnnnnnnnnnnnnnnnnnnnnnnnnnnnnnnnnnnnnnnnnnnnnnnnnnnnnnnnnnnnnnnnnnnnnnnnnnnnnnnnnnnnnnnnnnnnnnnnnnnnnnnnnnnnnnnnnnnnnnnnnnnnnnnnnnnnnnnnnnnnnnnnnnnnnnnnnnnnnnnnnnnnnnnnnnnnnnnnnnnnnnnnnnnnnnnnnnnnnnnnnnnnnnnnnnnnnnnnnnnnnnnnnnnnnnnnnnnnnnnnnnnnnnnnnnnnnnnnnnnnnnnnnnnnnnnnnnnnnnnnnnnnnnnnnnnnnnnnnnnnnnnnnnnnnnnnnnnnnnnnnnnnnnnnnnnnnnnnnnnnnnnnnnnnnnnnnnnnnnnnnnnnnnnnnnnnnnnnnnnnnnnnnnnnnnnnnnnnnnnnnnnnnnnnnnnnnnnnnnnnnnnnnnnnnnnnnnnnnnnnnnnnnnnnnnnnnnnnnnnnnnnnnnnnnnnnnnnnnnnnnnnnnnnnnnnnnnnnnnnnnnnnnnnnnnnnnnnnnnnnnnnnnnnnnnnnnnnnnnnnnnnnnnnnnnnnnnnnnnnnnnnnnnnnnnnnnnnnnnnnnnnnnnnnnnnnnnnnnnnnnnnnnnnnnnnnnnnnnnnnnnnnnnnnnnnnnnnnnnnnnnnnnnnnnnnnnnnnnnnnnnnnnnnnnnnnnnnnnnnnnnnnnnnnnnnnnnnnnnnnnnnnnnnnnnnnnnnnnnnnnnnnnnnnnnnnnnnnnnnnnnnnnnnnnnnnnnnnnnnnnnnnnnnnnnnnnnnnnnnnnnnnnnnnnnnnnnnnnnnnnnnnnnnnnnnnnnnnnnnnnnnnnnnnnnnnnnnnnnnnnnnnnnnnnnnnnnnnnnnnnnnnnnnnnnnnnnnnnnnnnnnnnnnnnnnnnnnnnnnnnnnnnnnnnnnnnnnnnnnnnnnnnnnnnnnnnnnnnnnnnnnnnnnnnnnnnnnnnnnnnnnnnnnnnnnnnnnnnnnnnnnnnnnnnnnnnnnnnnnnnnnnnnnnnnnnnnnnnnnnnnnnnnnnnnnnnnnnnnnnnnnnnnnnnnnnnnnnnnnnnnnnnnnnnnnnnnnnnnnnnnnnnnnnnnnnnnnnnnnnnnnnnnnnnnnnnnnnnnnnnnnnnnnnnnnnnnnnnnnnnnnnnnnnnnnnnnnnnnnnnnnnnnnnnnnnnnnnnnnnnnnnnnnnnnnnnnnnnnnnnnnnnnnnnnnnnnnnnnnnnnnnnnnnnnnnnnnnnnnnnnnnnnnnnnnnnnnnnnnnnnnnnnnnnnnnnnnnnnnnnnnnnnnnnnnnnnnnnnnnnnnnnnnnnnnnnnnnnnnnnnnnnnnnnnnnnnnnnnnnnnnnnnnnnnnnnnnnnnnnnnnnnnnnnnnnnnnnnnnnnnnnnnnnnnnnnnnnnnnnnnnnnnnnnnnnnnnnnnnnnnnnnnnnnnnnnnnnnnnnnnnnnnnnnnnnnnnnnnnnnnnnnnnnnnnnnnnnnnnnnnnnnnnnnnnnnnnnnnnnnnnnnnnnnnnnnnnnnnnnnnnnnnnnnnnnnnnnnnnnnnnnnnnnnnnnnnnnnnnnnnnnnnnnnnnnnnnnnnnnnnnnnnnnnnnnnnnnnnnnnnnnnnnnnnnnnnnnnnnnnnnnnnnnnnnnnnnnnnnnnnnnnnnnnnnnnnnnnnnnnnnnnnnnnnnnnnnnnnnnnnnnnnnnnnnnnnnnnnnnnnnnnnnnnnnnnnnnnnnnnnnnnnnnnnnnnnnnnnnnnnnnnnnnnnnnnnnnnnnnnnnnnnnnnnnnnnnnnnnnnnnnnnnnnnnnnnnnnnnnnnnnnnnnnnnnnnnnnnnnnnnnnnnnnnnnnnnnnnnnnnnnnnnnnnnnnnnnnnnnnnnnnnnnnnnnnnnnnnnnnnnnnnnnnnnnnnnnnnnnnnnnnnnnnnnnnnnnnnnnnnnnnnnnnnnnnnnnnnnnnnnnnnnnnnnnnnnnnnnnnnnnnnnnnnnnnnnnnnnnnnnnnnnnnnnnnnnnnnnnnnnnnnnnnnnnnnnnnnnnnnnnnnnnnnnnnnnnnnnnnnnnnnnnnnnnnnnnnnnnnnnnnnnnnnnnnnnnnnnnnnnnnnnnnnnnnnnnnnnnnnnnnnnnnnnnnnnnnnnnnnnnnnnnnnnnnnnnnnnnnnnnnnnnnnnnnnnnnnnnnnnnnnnnnnnnnnnnnnnnnnnnnnnnnnnnnnnnnnnnnnnnnnnnnnnnnnnnnnnnnnnnnnnnnnnnnnnnnnnnnnnnnnnnnnnnnnnnnnnnnnnnnnnnnnnnnnnnnnnnnnnnnnnnnnnnnnnnnnnnnnnnnnnnnnnnnnnnnnnnnnnnnnnnnnnnnnnnnnnnnnnnnnnnnnnnnnnnnnnnnnnnnnnnnnnnnnnnnnnnnnnnnnnnnnnnnnnnnnnnnnnnnnnnnnnnnnnnnnnnnnnnnnnnnnnnnnnnnnnnnnnnnnnnnnnnnnnnnnnnnnnnnnnnnnnnnnnnnnnnnnnnnnnnnnnnnnnnnnnnnnnnnnnnnnnnnnnnnnnnnnnnnnnnnnnnnnnnnnnnnnnnnnnnnnnnnnnnnnnnnnnnnnnnnnnnnnnnnnnnnnnnnnnnnnnnnnnnnnnnnnnnnnnnnnnnnnnnnnnnnnnnnnnnnnnnnnnnnnnnnnnnnnnnnnnnnnnnnnnnnnnnnnnnnnnnnnnnnnnnnnnnnnnnnnnnnnnnnnnnnnnnnnnnnnnnnnnnnnnnnnnnnnnnnnnnnnnnnnnnnnnnnnnnnnnnnnnnnnnnnnnnnnnnnnnnnnnnnnnnnnnnnnnnnnnnnnnnnnnnnnnnnnnnnnnnnnnnnnnnnnnnnnnnnnnnnnnnnnnnnnnnnnnnnnnnnnnnnnnnnnnnnnnnnnnnnnnnnnnnnnnnnnnnnnnnnnnnnnnnnnnnnnnnnnnnnnnnnnnnnnnnnnnnnnnnnnnnnnnnnnnnnnnnnnnnnnnnnnnnnnnnnnnnnnnnnnnnnnnnnnnnnnnnnnnnnnnnnnnnnnnnnnnnnnnnnnnnnnnnnnnnnnnnnnnnnnnnnnnnnnnnnnnnnnnnnnnnnnnnnnnnnnnnnnnnnnnnnnnnnnnnnnnnnnnnnnnnnnnnnnnnnnnnnnnnnnnnnnnnnnnnnnnnnnnnnnnnnnnnnnnnnnnnnnnnnnnnnnnnnnnnnnnnnnnnnnnnnnnnnnnnnnnnnnnnnnnnnnnnnnnnnnnnnnnnnnnnnnnnnnnnnnnnnnnnnnnnnnnnnnnnnnnnnnnnnnnnnnnnnnnnnnnnnnnnnnnnnnnnnnnnnnnnnnnnnnnnnnnnnnnnnnnnnnnnnnnnnnnnnnnnnnnnnnnnnnnnnnnnnnnnnnnnnnnnnnnnnnnnnnnnnnnnnnnnnnnnnnnnnnnnnnnnnnnnnnnnnnnnnnnnnnnnnnnnnnnnnnnnnnnnnnnnnnnnnnnnnnnnnnnnnnnnnnnnnnnnnnnnnnnnnnnnnnnnnnnnnnnnnnnnnnnnnnnnnnnnnnnnnnnnnnnnnnnnnnnnnnnnnnnnnnnnnnnnnnnnnnnnnnnnnnnnnnnnnnnnnnnnnnnnnnnnnnnnnnnnnnnnnnnnnnnnnnnnnnnnnnnnnnnnnnnnnnnnnnnnnnnnnnnnnnnnnnnnnnnnnnnnnnnnnnnnnnnnnnnnnnnnnnnnnnnnnnnnnnnnnnnnnnnnnnnnnnnnnnnnnnnnnnnnnnnnnnnnnnnnnnnnnnnnnnnnnnnnnnnnnnnnnnnnnnnnnnnnnnnnnnnnnnnnnnnnnnnnnnnnnnnnnnnnnnnnnnnnnnnnnnnnnnnnnnnnnnnnnnnnnnnnnnnnnnnnnnnnnnnnnnnnnnnnnnnnnnnnnnnnnnnnnnnnnnnnnnnnnnnnnnnnnnnnnnnnnnnnnnnnnnnnnnnnnnnnnnnnnnnnnnnnnnnnnnnnnnnnnnnnnnnnnnnnnnnnnnnnnnnnnnnnnnnnnnnnnnnnnnnnnnnnnnnnnnnnnnnnnnnnnnnnnnnnnnnnnnnnnnnnnnnnnnnnnnnnnnnnnnnnnnnnnnnnnnnnnnnnnnnnnnnnnnnnnnnnnnnnnnnnnnnnnnnnnnnnnnnnnnnnnnnnnnnnnnnnnnnnnnnnnnnnnnnnnnnnnnnnnnnnnnnnnnnnnnnnnnnnnnnnnnnnnnnnnnnnnnnnnnnnnnnnnnnnnnnnnnnnnnnnnnnnnnnnnnnnnnnnnnnnnnnnnnnnnnnnnnnnnnnnnnnnnnnnnnnnnnnnnnnnnnnnnnnnnnnnnnnnnnnnnnnnnnnnnnnnnnnnnnnnnnnnnnnnnnnnnnnnnnnnnnnnnnnnnnnnnnnnnnnnnnnnnnnnnnnnnnnnnnnnnnnnnnnnnnnnnnnnnnnnnnnnnnnnnnnnnnnnnnnnnnnnnnnnnnnnnnnnnnnnnnnnnnnnnnnnnnnnnnnnnnnnnnnnnnnnnnnnnnnnnnnnnnnnnnnnnnnnnnnnnnnnnnnnnnnnnnnnnnnnnnnnnnnnnnnnnnnnnnnnnnnnnnnnnnnnnnnnnnnnnnnnnnnnnnnnnnnnnnnnnnnnnnnnnnnnnnnnnnnnnnnnnnnnnnnnnnnnnnnnnnnnnnnnnnnnnnnnnnnnnnnnnnnnnnnnnnnnnnnnnnnnnnnnnnnnnnnnnnnnnnnnnnnnnnnnnnnnnnnnnnnnnnnnnnnnnnnnnnnnnnnnnnnnnnnnnnnnnnnnnnnnnnnnnnnnnnnnnnnnnnnnnnnnnnnnnnnnnnnnnnnnnnnnnnnnnnnnnnnnnnnnnnnnnnnnnnnnnnnnnnnnnnnnnnnnnnnnnnnnnnnnnnnnnnnnnnnnnnnnnnnnnnnnnnnnnnnnnnnnnnnnnnnnnnnnnnnnnnnnnnnnnnnnnnnnnnnnnnnnnnnnnnnnnnnnnnnnnnnnnnnnnnnnnnnnnnnnnnnnnnnnnnnnnnnnnnnnnnnnnnnnnnnnnnnnnnnnnnnnnnnnnnnnnnnnnnnnnnnnnnnnnnnnnnnnnnnnnnnnnnnnnnnnnnnnnnnnnnnnnnnnnnnnnnnnnnnnnnnnnnnnnnnnnnnnnnnnnnnnnnnnnnnnnnnnnnnnnnnnnnnnnnnnnnnnnnnnnnnnnnnnnnnnnnnnnnnnnnnnnnnnnnnnnnnnnnnnnnnnnnnnnnnnnnnnnnnnnnnnnnnnnnnnnnnnnnnnnnnnnnnnnnnnnnnnnnnnnnnnnnnnnnnnnnnnnnnnnnnnnnnnnnnnnnnnnnnnnnnnnnnnnnnnnnnnnnnnnnnnnnnnnnnnnnnnnnnnnnnnnnnnnnnnnnnnnnnnnnnnnnnnnnnnnnnnnnnnnnnnnnnnnnnnnnnnnnnnnnnnnnnnnnnnnnnnnnnnnnnnnnnnnnnnnnnnnnnnnnnnnnnnnnnnnnnnnnnnnnnnnnnnnnnnnnnnnnnnnnnnnnnnnnnnnnnnnnnnnnnnnnnnnnnnnnnnnnnnnnnnnnnnnnnnnnnnnnnnnnnnnnnnnnnnnnnnnnnnnnnnnnnnnnnnnnnnnnnnnnnnnnnnnnnnnnnnnnnnnnnnnnnnnnnnnnnnnnnnnnnnnnnnnnnnnnnnnnnnnnnnnnnnnnnnnnnnnnnnnnnnnnnnnnnnnnnnnnnnnnnnnnnnnnnnnnnnnnnnnnnnnnnnnnnnnnnnnnnnnnnnnnnnnnnnnnnnnnnnnnnnnnnnnnnnnnnnnnnnnnnnnnnnnnnnnnnnnnnnnnnnnnnnnnnnnnnnnnnnnnnnnnnnnnnnnnnnnnnnnnnnnnnnnnnnnnnnnnnnnnnnnnnnnnnnnnnnnnnnnnnnnnnnnnnnnnnnnnnnnnnnnnnnnnnnnnnnnnnnnnnnnnnnnnnnnnnnnnnnnnnnnnnnnnnnnnnnnnnnnnnnnnnnnnnnnnnnnnnnnnnnnnnnnnnnnnnnnnnnnnnnnnnnnnnnnnnnnnnnnnnnnnnnnnnnnnnnnnnnnnnnnnnnnnnnnnnnnnnnnnnnnnnnnnnnnnnnnnnnnnnnnnnnnnnnnnnnnnnnnnnnnnnnnnnnnnnnnnnnnnnnnnnnnnnnnnnnnnnnnnnnnnnnnnnnnnnnnnnnnnnnnnnnnnnnnnnnnnnnnnnnnnnnnnnnnnnnnnnnnnnnnnnnnnnnnnnnnnnnnnnnnnnnnnnnnnnnnnnnnnnnnnnnnnnnnnnnnnnnnnnnnnnnnnnnnnnnnnnnnnnnnnnnnnnnnnnnnnnnnnnnnnnnnnnnnnnnnnnnnnnnnnnnnnnnnnnnnnnnnnnnnnnnnnnnnnnnnnnnnnnnnnnnnnnnnnnnnnnnnnnnnnnnnnnnnnnnnnnnnnnnnnnnnnnnnnnnnnnnnnnnnnnnnnnnnnnnnnnnnnnnnnnnnnnnnnnnnnnnnnnnnnnnnnnnnnnnnnnnnnnnnnnnnnnnnnnnnnnnnnnnnnnnnnnnnnnnnnnnnnnnnnnnnnnnnnnnnnnnnnnnnnnnnnnnnnnnnnnnnnnnnnnnnnnnnnnnnnnnnnnnnnnnnnnnnnnnnnnnnnnnnnnnnnnnnnnnnnnnnnnnnnnnnnnnnnnnnnnnnnnnnnnnnnnnnnnnnnnnnnnnnnnnnnnnnnnnnnnnnnnnnnnnnnnnnnnnnnnnnnnnnnnnnnnnnnnnnnnnnnnnnnnnnnnnnnnnnnnnnnnnnnnnnnnnnnnnnnnnnnnnnnnnnnnnnnnnnnnnnnnnnnnnnnnnnnnnnnnnnnnnnnnnnnnnnnnnnnnnnnnnnnnnnnnnnnnnnnnnnnnnnnnnnnnnnnnnnnnnnnnnnnnnnnnnnnnnnnnnnnnnnnnnnnnnnnnnnnnnnnnnnnnnnnnnnnnnnnnnnnnnnnnnnnnnnnnnnnnnnnnnnnnnnnnnnnnnnnnnnnnnnnnnnnnnnnnnnnnnnnnnnnnnnnnnnnnnnnnnnnnnnnnnnnnnnnnnnnnnnnnnnnnnnnnnnnnnnnnnnnnnnnnnnnnnnnnnnnnnnnnnnnnnnnnnnnnnnnnnnnnnnnnnnnnnnnnnnnnnnnnnnnnnnnnnnnnnnnnnnnnnnnnnnnnnnnnnnnnnnnnnnnnnnnnnnnnnnnnnnnnnnnnnnnnnnnnnnnnnnnnnnnnnnnnnnnnnnnnnnnnnnnnnnnnnnnnnnnnnnnnnnnnnnnnnnnnnnnnnnnnnnnnnnnnnnnnnnnnnnnnnnnnnnnnnnnnnnnnnnnnnnnnnnnnnnnnnnnnnnnnnnnnnnnnnnnnnnnnnnnnnnnnnnnnnnnnnnnnnnnnnnnnnnnnnnnnnnnnnnnnnnnnnnnnnnnnnnnnnnnnnnnnnnnnnnnnnnnnnnnnnnnnnnnnnnnnnnnnnnnnnnnnnnnnnnnnnnnnnnnnnnnnnnnnnnnnnnnnnnnnnnnnnnnnnnnnnnnnnnnnnnnnnnnnnnnnnnnnnnnnnnnnnnnnnnnnnnnnnnnnnnnnnnnnnnnnnnnnnnnnnnnnnnnnnnnnnnnnnnnnnnnnnnnnnnnnnnnnnnnnnnnnnnnnnnnnnnnnnnnnnnnnnnnnnnnnnnnnnnnnnnnnnnnnnnnnnnnnnnnnnnnnnnnnnnnnnnnnnnnnnnnnnnnnnnnnnnnnnnnnnnnnnnnnnnnnnnnnnnnnnnnnnnnnnnnnnnnnnnnnnnnnnnnnnnnnnnnnnnnnnnnnnnnnnnnnnnnnnnnnnnnnnnnnnnnnnnnnnnnnnnnnnnnnnnnnnnnnnnnnnnnnnnnnnnnnnnnnnnnnnnnnnnnnnnnnnnnnnnnnnnnnnnnnnnnnnnnnnnnnnnnnnnnnnnnnnnnnnnnnnnnnnnnnnnnnnnnnnnnnnnnnnnnnnnnnnnnnnnnnnnnnnnnnnnnnnnnnnnnnnnnnnnnnnnnnnnnnnnnnnnnnnnnnnnnnnnnnnnnnnnnnnnnnnnnnnnnnnnnnnnnnnnnnnnnnnnnnnnnnnnnnnnnnnnnnnnnnnnnnnnnnnnnnnnnnnnnnnnnnnnnnnnnnnnnnnnnnnnnnnnnnnnnnnnnnnnnnnnnnnnnnnnnnnnnnnnnnnnnnnnnnnnnnnnnnnnnnnnnnnnnnnnnnnnnnnnnnnnnnnnnnnnnnnnnnnnnnnnnnnnnnnnnnnnnnnnnnnnnnnnnnnnnnnnnnnnnnnnnnnnnnnnnnnnnnnnnnnnnnnnnnnnnnnnnnnnnnnnnnnnnnnnnnnnnnnnnnnnnnnnnnnnnnnnnnnnnnnnnnnnnnnnnnnnnnnnnnnnnnnnnnnnnnnnnnnnnnnnnnnnnnnnnnnnnnnnnnnnnnnnnnnnnnnnnnnnnnnnnnnnnnnnnnnnnnnnnnnnnnnnnnnnnnnnnnnnnnnnnnnnnnnnnnnnnnnnnnnnnnnnnnnnnnnnnnnnnnnnnnnnnnnnnnnnnnnnnnnnnnnnnnnnnnnnnnnnnnnnnnnnnnnnnnnnnnnnnnnnnnnnnnnnnnnnnnnnnnnnnnnnnnnnnnnnnnnnnnnnnnnnnnnnnnnnnnnnnnnnnnnnnnnnnnnnnnnnnnnnnnnnnnnnnnnnnnnnnnnnnnnnnnnnnnnnnnnnnnnnnnnnnnnnnnnnnnnnnnnnnnnnnnnnnnnnnnnnnnnnnnnnnnnnnnnnnnnnnnnnnnnnnnnnnnnnnnnnnnnnnnnnnnnnnnnnnnnnnnnnnnnnnnnnnnnnnnnnnnnnnnnnnnnnnnnnnnnnnnnnnnnnnnnnnnnnnnnnnnnnnnnnnnnnnnnnnnnnnnnnnnnnnnnnnnnnnnnnnnnnnnnnnnnnnnnnnnnnnnnnnnnnnnnnnnnnnnnnnnnnnnnnnnnnnnnnnnnnnnnnnnnnnnnnnnnnnnnnnnnnnnnnnnnnnnnnnnnnnnnnnnnnnnnnnnnnnnnnnnnnnnnnnnnnnnnnnnnnnnnnnnnnnnnnnnnnnnnnnnnnnnnnnnnnnnnnnnnnnnnnnnnnnnnnnnnnnnnnnnnnnnnnnnnnnnnnnnnnnnnnnnnnnnnnnnnnnnnnnnnnnnnnnnnnnnnnnnnnnnnnnnnnnnnnnnnnnnnnnnnnnnnnnnnnnnnnnnnnnnnnnnnnnnnnnnnnnnnnnnnnnnnnnnnnnnnnnnnnnnnnnnnnnnnnnnnnnnnnnnnnnnnnnnnnnnnnnnnnnnnnnnnnnnnnnnnnnnnnnnnnnnnnnnnnnnnnnnnnnnnnnnnnnnnnnnnnnnnnnnnnnnnnnnnnnnnnnnnnnnnnnnnnnnnnnnnnnnnnnnnnnnnnnnnnnnnnnnnnnnnnnnnnnnnnnnnnnnnnnnnnnnnnnnnnnnnnnnnnnnnnnnnnnnnnnnnnnnnnnnnnnnnnnnnnnnnnnnnnnnnnnnnnnnnnnnnnnnnnnnnnnnnnnnnnnnnnnnnnnnnnnnnnnnnnnnnnnnnnnnnnnnnnnnnnnnnnnnnnnnnnnnnnnnnnnnnnnnnnnnnnnnnnnnnnnnnnnnnnnnnnnnnnnnnnnnnnnnnnnnnnnnnnnnnnnnnnnnnnnnnnnnnnnnnnnnnnnnnnnnnnnnnnnnnnnnnnnnnnnnnnnnnnnnnnnnnnnnnnnnnnnnnnnnnnnnnnnnnnnnnnnnnnnnnnnnnnnnnnnnnnnnnnnnnnnnnnnnnnnnnnnnnnnnnnnnnnnnnnnnnnnnnnnnnnnnnnnnnnnnnnnnnnnnnnnnnnnnnnnnnnnnnnnnnnnnnnnnnnnnnnnnnnnnnnnnnnnnnnnnnnnnnnnnnnnnnnnnnnnnnnnnnnnnnnnnnnnnnnnnnnnnnnnnnnnnnnnnnnnnnnnnnnnnnnnnnnnnnnnnnnnnnnnnnnnnnnnnnnnnnnnnnnnnnnnnnnnnnnnnnnnnnnnnnnnnnnnnnnnnnnnnnnnnnnnnnnnnnnnnnnnnnnnnnnnnnnnnnnnnnnnnnnnnnnnnnnnnnnnnnnnnnnnnnnnnnnnnnnnnnnnnnnnnnnnnnnnnnnnnnnnnnnnnnnnnnnnnnnnnnnnnnnnnnnnnnnnnnnnnnnnnnnnnnnnnnnnnnnnnnnnnnnnnnnnnnnnnnnnnnnnnnnnnnnnnnnnnnnnnnnnnnnnnnnnnnnnnnnnnnnnnnnnnnnnnnnnnnnnnnnnnnnnnnnnnnnnnnnnnnnnnnnnnnnnnnnnnnnnnnnnnnnnnnnnnnnnnnnnnnnnnnnnnnnnnnnnnnnnnnnnnnnnnnnnnnnnnnnnnnnnnnnnnnnnnnnnnnnnnnnnnnnnnnnnnnnnnnnnnnnnnnnnnnnnnnnnnnnnnnnnnnnnnnnnnnnnnnnnnnnnnnnnnnnnnnnnnnnnnnnnnnnnnnnnnnnnnnnnnnnnnnnnnnnnnnnnnnnnnnnnnnnnnnnnnnnnnnnnnnnnnnnnnnnnnnnnnnnnnnnnnnnnnnnnnnnnnnnnnnnnnnnnnnnnnnnnnnnnnnnnnnnnnnnnnnnnnnnnnnnnnnnnnnnnnnnnnnnnnnnnnnnnnnnnnnnnnnnnnnnnnnnnnnnnnnnnnnnnnnnnnnnnnnnnnnnnnnnnnnnnnnnnnnnnnnnnnnnnnnnnnnnnnnnnnnnnnnnnnnnnnnnnnnnnnnnnnnnnnnnnnnnnnnnnnnnnnnnnnnnnnnnnnnnnnnnnnnnnnnnnnnnnnnnnnnnnnnnnnnnnnnnnnnnnnnnnnnnnnnnnnnnnnnnnnnnnnnnnnnnnnnnnnnnnnnnnnnnnnnnnnnnnnnnnnnnnnnnnnnnnnnnnnnnnnnnnnnnnnnnnnnnnnnnnnnnnnnnnnnnnnnnnnnnnnnnnnnnnnnnnnnnnnnnnnnnnnnnnnnnnnnnnnnnnnnnnnnnnnnnnnnnnnnnnnnnnnnnnnnnnnnnnnnnnnnnnnnnnnnnnnnnnnnnnnnnnnnnnnnnnnnnnnnnnnnnnnnnnnnnnnnnnnnnnnnnnnnnnnnnnnnnnnnnnnnnnnnnnnnnnnnnnnnnnnnnnnnnnnnnnnnnnnnnnnnnnnnnnnnnnnnnnnnnnnnnnnnnnnnnnnnnnnnnnnnnnnnnnnnnnnnnnnnnnnnnnnnnnnnnnnnnnnnnnnnnnnnnnnnnnnnnnnnnnnnnnnnnnnnnnnnnnnnnnnnnnnnnnnnnnnnnnnnnnnnnnnnnnnnnnnnnnnnnnnnnnnnnnnnnnnnnnnnnnnnnnnnnnnnnnnnnnnnnnnnnnnnnnnnnnnnnnnnnnnnnnnnnnnnnnnnnnnnnnnnnnnnnnnnnnnnnnnnnnnnnnnnnnnnnnnnnnnnnnnnnnnnnnnnnnnnnnnnnnnnnnnnnnnnnnnnnnnnnnnnnnnnnnnnnnnnnnnnnnnnnnnnnnnnnnnnnnnnnnnnnnnnnnnnnnnnnnnnnnnnnnnnnnnnnnnnnnnnnnnnnnnnnnnnnnnnnnnnnnnnnnnnnnnnnnnnnnnnnnnnnnnnnnnnnnnnnnnnnnnnnnnnnnnnnnnnnnnnnnnnnnnnnnnnnnnnnnnnnnnnnnnnnnnnnnnnnnnnnnnnnnnnnnnnnnnnnnnnnnnnnnnnnnnnnnnnnnnnnnnnnnnnnnnnnnnnnnnnnnnnnnnnnnnnnnnnnnnnnnnnnnnnnnnnnnnnnnnnnnnnnnnnnnnnnnnnnnnnnnnnnnnnnnnnnnnnnnnnnnnnnnnnnnnnnnnnnnnnnnnnnnnnnnnnnnnnnnnnnnnnnnnnnnnnnnnnnnnnnnnnnnnnnnnnnnnnnnnnnnnnnnnnnnnnnnnnnnnnnnnnnnnnnnnnnnnnnnnnnnnnnnnnnnnnnnnnnnnnnnnnnnnnnnnnnnnnnnnnnnnnnnnnnnnnnnnnnnnnnnnnnnnnnnnnnnnnnnnnnnnnnnnnnnnnnnnnnnnnnnnnnnnnnnnnnnnnnnnnnnnnnnnnnnnnnnnnnnnnnnnnnnnnnnnnnnnnnnnnnnnnnnnnnnnnnnnnnnnnnnnnnnnnnnnnnnnnnnnnnnnnnnnnnnnnnnnnnnnnnnnnnnnnnnnnnnnnnnnnnnnnnnnnnnnnnnnnnnnnnnnnnnnnnnnnnnnnnnnnnnnnnnnnnnnnnnnnnnnnnnnnnnnnnnnnnnnnnnnnnnnnnnnnnnnnnnnnnnnnnnnnnnnnnnnnnnnnnnnnnnnnnnnnnnnnnnnnnnnnnnnnnnnnnnnnnnnnnnnnnnnnnnnnnnnnnnnnnnnnnnnnnnnnnnnnnnnnnnnnnnnnnnnnnnnnnnnnnnnnnnnnnnnnnnnnnnnnnnnnnnnnnnnnnnnnnnnnnnnnnnnnnnnnnnnnnnnnnnnnnnnnnnnnnnnnnnnnnnnnnnnnnnnnnnnnnnnnnnnnnnnnnnnnnnnnnnnnnnnnnnnnnnnnnnnnnnnnnnnnnnnnnnnnnnnnnnnnnnnnnnnnnnnnnnnnnnnnnnnnnnnnnnnnnnnnnnnnnnnnnnnnnnnnnnnnnnnnnnnnnnnnnnnnnnnnnnnnnnnnnnnnnnnnnnnnnnnnnnnnnnnnnnnnnnnnnnnnnnnnnnnnnnnnnnnnnnnnnnnnnnnnnnnnnnnnnnnnnnnnnnnnnnnnnnnnnnnnnnnnnnnnnnnnnnnnnnnnnnnnnnnnnnnnnnnnnnnnnnnnnnnnnnnnnnnnnnnnnnnnnnnnnnnnnnnnnnnnnnnnnnnnnnnnnnnnnnnnnnnnnnnnnnnnnnnnnnnnnnnnnnnnnnnnnnnnnnnnnnnnnnnnnnnnnnnnnnnnnnnnnnnnnnnnnnnnnnnnnnnnnnnnnnnnnnnnnnnnnnnnnnnnnnnnnnnnnnnnnnnnnnnnnnnnnnnnnnnnnnnnnnnnnnnnnnnnnnnnnnnnnnnnnnnnnnnnnnnnnnnnnnnnnnnnnnnnnnnnnnnnnnnnnnnnnnnnnnnnnnnnnnnnnnnnnnnnnnnnnnnnnnnnnnnnnnnnnnnnnnnnnnnnnnnnnnnnnnnnnnnnnnnnnnnnnnnnnnnnnnnnnnnnnnnnnnnnnnnnnnnnnnnnnnnnnnnnnnnnnnnnnnnnnnnnnnnnnnnnnnnnnnnnnnnnnnnnnnnnnnnnnnnnnnnnnnnnnnnnnnnnnnnnnnnnnnnnnnnnnnnnnnnnnnnnnnnnnnnnnnnnnnnnnnnnnnnnnnnnnnnnnnnnnnnnnnnnnnnnnnnnnnnnnnnnnnnnnnnnnnnnnnnnnnnnnnnnnnnnnnnnnnnnnnnnnnnnnnnnnnnnnnnnnnnnnnnnnnnnnnnnnnnnnnnnnnnnnnnnnnnnnnnnnnnnnnnnnnnnnnnnnnnnnnnnnnnnnnnnnnnnnnnnnnnnnnnnnnnnnnnnnnnnnnnnnnnnnnnnnnnnnnnnnnnnnnnnnnnnnnnnnnnnnnnnnnnnnnnnnnnnnnnnnnnnnnnnnnnnnnnnnnnnnnnnnnnnnnnnnnnnnnnnnnnnnnnnnnnnnnnnnnnnnnnnnnnnnnnnnnnnnnnnnnnnnnnnnnnnnnnnnnnnnnnnnnnnnnnnnnnnnnnnnnnnnnnnnnnnnnnnnnnnnnnnnnnnnnnnnnnnnnnnnnnnnnnnnnnnnnnnnnnnnnnnnnnnnnnnnnnnnnnnnnnnnnnnnnnnnnnnnnnnnnnnnnnnnnnnnnnnnnnnnnnnnnnnnnnnnnnnnnnnnnnnnnnnnnnnnnnnnnnnnnnnnnnnnnnnnnnnnnnnnnnnnnnnnnnnnnnnnnnnnnnnnnnnnnnnnnnnnnnnnnnnnnnnnnnnnnnnnnnnnnnnnnnnnnnnnnnnnnnnnnnnnnnnnnnnnnnnnnnnnnnnnnnnnnnnnnnnnnnnnnnnnnnnnnnnnnnnnnnnnnnnnnnnnnnnnnnnnnnnnnnnnnnnnnnnnnnnnnnnnnnnnnnnnnnnnnnnnnnnnnnnnnnnnnnnnnnnnnnnnnnnnnnnnnnnnnnnnnnnnnnnnnnnnnnnnnnnnnnnnnnnnnnnnnnnnnnnnnnnnnnnnnnnnnnnnnnnnnnnnnnnnnnnnnnnnnnnnnnnnnnnnnnnnnnnnnnnnnnnnnnnnnnnnnnnnnnnnnnnnnnnnnnnnnnnnnnnnnnnnnnnnnnnnnnnnnnnnnnnnnnnnnnnnnnnnnnnnnnnnnnnnnnnnnnnnnnnnnnnnnnnnnnnnnnnnnnnnnnnnnnnnnnnnnnnnnnnnnnnnnnnnnnnnnnnnnnnnnnnnnnnnnnnnnnnnnnnnnnnnnnnnnnnnnnnnnnnnnnnnnnnnnnnnnnnnnnnnnnnnnnnnnnnnnnnnnnnnnnnnnnnnnnnnnnnnnnnnnnnnnnnnnnnnnnnnnnnnnnnnnnnnnnnnnnnnnnnnnnnnnnnnnnnnnnnnnnnnnnnnnnnnnnnnnnnnnnnnnnnnnnnnnnnnnnnnnnnnnnnnnnnnnnnnnnnnnnnnnnnnnnnnnnnnnnnnnnnnnnnnnnnnnnnnnnnnnnnnnnnnnnnnnnnnnnnnnnnnnnnnnnnnnnnnnnnnnnnnnnnnnnnnnnnnnnnnnnnnnnnnnnnnnnnnnnnnnnnnnnnnnnnnnnnnnnnnnnnnnnnnnnnnnnnnnnnnnnnnnnnnnnnnnnnnnnnnnnnnnnnnnnnnnnnnnnnnnnnnnnnnnnnnnnnnnnnnnnnnnnnnnnnnnnnnnnnnnnnnnnnnnnnnnnnnnnnnnnnnnnnnnnnnnnnnnnnnnnnnnnnnnnnnnnnnnnnnnnnnnnnnnnnnnnnnnnnnnnnnnnnnnnnnnnnnnnnnnnnnnnnnnnnnnnnnnnnnnnnnnnnnnnnnnnnnnnnnnnnnnnnnnnnnnnnnnnnnnnnnnnnnnnnnnnnnnnnnnnnnnnnnnnnnnnnnnnnnnnnnnnnnnnnnnnnnnnnnnnnnnnnnnnnnnnnnnnnnnnnnnnnnnnnnnnnnnnnnnnnnnnnnnnnnnnnnnnnnnnnnnnnnnnnnnnnnnnnnnnnnnnnnnnnnnnnnnnnnnnnnnnnnnnnnnnnnnnnnnnnnnnnnnnnnnnnnnnnnnnnnnnnnnnnnnnnnnnnnnnnnnnnnnnnnnnnnnnnnnnnnnnnnnnnnnnnnnnnnnnnnnnnnnnnnnnnnnnnnnnnnnnnnnnnnnnnnnnnnnnnnnnnnnnnnnnnnnnnnnnnnnnnnnnnnnnnnnnnnnnnnnnnnnnnnnnnnnnnnnnnnnnnnnnnnnnnnnnnnnnnnnnnnnnnnnnnnnnnnnnnnnnnnnnnnnnnnnnnnnnnnnnnnnnnnnnnnnnnnnnnnnnnnnnnnnnnnnnnnnnnnnnnnnnnnnnnnnnnnnnnnnnnnnnnnnnnnnnnnnnnnnnnnnnnnnnnnnnnnnnnnnnnnnnnnnnnnnnnnnnnnnnnnnnnnnnnnnnnnnnnnnnnnnnnnnnnnnnnnnnnnnnnnnnnnnnnnnnnnnnnnnnnnnnnnnnnnnnnnnnnnnnnnnnnnnnnnnnnnnnnnnnnnnnnnnnnnnnnnnnnnnnnnnnnnnnnnnnnnnnnnnnnnnnnnnnnnnnnnnnnnnnnnnnnnnnnnnnnnnnnnnnnnnnnnnnnnnnnnnnnnnnnnnnnnnnnnnnnnnnnnnnnnnnnnnnnnnnnnnnnnnnnnnnnnnnnnnnnnnnnnnnnnnnnnnnnnnnnnnnnnnnnnnnnnnnnnnnnnnnnnnnnnnnnnnnnnnnnnnnnnnnnnnnnnnnnnnnnnnnnnnnnnnnnnnnnnnnnnnnnnnnnnnnnnnnnnnnnnnnnnnnnnnnnnnnnnnnnnnnnnnnnnnnnnnnnnnnnnnnnnnnnnnnnnnnnnnnnnnnnnnnnnnnnnnnnnnnnnnnnnnnnnnnnnnnnnnnnnnnnnnnnnnnnnnnnnnnnnnnnnnnnnnnnnnnnnnnnnnnnnnnnnnnnnnnnnnnnnnnnnnnnnnnnnnnnnnnnnnnnnnnnnnnnnnnnnnnnnnnnnnnnnnnnnnnnnnnnnnnnnnnnnnnnnnnnnnnnnnnnnnnnnnnnnnnnnnnnnnnnnnnnnnnnnnnnnnnnnnnnnnnnnnnnnnnnnnnnnnnnnnnnnnnnnnnnnnnnnnnnnnnnnnnnnnnnnnnnnnnnnnnnnnnnnnnnnnnnnnnnnnnnnnnnnnnnnnnnnnnnnnnnnnnnnnnnnnnnnnnnnnnnnnnnnnnnnnnnnnnnnnnnnnnnnnnnnnnnnnnnnnnnnnnnnnnnnnnnnnnnnnnnnnnnnnnnnnnnnnnnnnnnnnnnnnnnnnnnnnnnnnnnnnnnnnnnnnnnnnnnnnnnnnnnnnnnnnnnnnnnnnnnnnnnnnnnnnnnnnnnnnnnnnnnnnnnnnnnnnnnnnnnnnnnnnnnnnnnnnnnnnnnnnnnnnnnnnnnnnnnnnnnnnnnnnnnnnnnnnnnnnnnnnnnnnnnnnnnnnnnnnnnnnnnnnnnnnnnnnnnnnnnnnnnnnnnnnnnnnnnnnnnnnnnnnnnnnnnnnnnnnnnnnnnnnnnnnnnnnnnnnnnnnnnnnnnnnnnnnnnnnnnnnnnnnnnnnnnnnnnnnnnnnnnnnnnnnnnnnnnnnnnnnnnnnnnnnnnnnnnnnnnnnnnnnnnnnnnnnnnnnnnnnnnnnnnnnnnnnnnnnnnnnnnnnnnnnnnnnnnnnnnnnnnnnnnnnnnnnnnnnnnnnnnnnnnnnnnnnnnnnnnnnnnnnnnnnnnnnnnnnnnnnnnnnnnnnnnnnnnnnnnnnnnnnnnnnnnnnnnnnnnnnnnnnnnnnnnnnnnnnnnnnnnnnnnnnnnnnnnnnnnnnnnnnnnnnnnnnnnnnnnnnnnnnnnnnnnnnnnnnnnnnnnnnnnnnnnnnnnnnnnnnnnnnnnnnnnnnnnnnnnnnnnnnnnnnnnnnnnnnnnnnnnnnnnnnnnnnnnnnnnnnnnnnnnnnnnnnnnnnnnnnnnnnnnnnnnnnnnnnnnnnnnnnnnnnnnnnnnnnnnnnnnnnnnnnnnnnnnnnnnnnnnnnnnnnnnnnnnnnnnnnnnnnnnnnnnnnnnnnnnnnnnnnnnnnnnnnnnnnnnnnnnnnnnnnnnnnnnnnnnnnnnnnnnnnnnnnnnnnnnnnnnnnnnnnnnnnnnnnnnnnnnnnnnnnnnnnnnnnnnnnnnnnnnnnnnnnnnnnnnnnnnnnnnnnnnnnnnnnnnnnnnnnnnnnnnnnnnnnnnnnnnnnnnnnnnnnnnnnnnnnnnnnnnnnnnnnnnnnnnnnnnnnnnnnnnnnnnnnnnnnnnnnnnnnnnnnnnnnnnnnnnnnnnnnnnnnnnnnnnnnnnnnnnnnnnnnnnnnnnnnnnnnnnnnnnnnnnnnnnnnnnnnnnnnnnnnnnnnnnnnnnnnnnnnnnnnnnnnnnnnnnnnnnnnnnnnnnnnnnnnnnnnnnnnnnnnnnnnnnnnnnnnnnnnnnnnnnnnnnnnnnnnnnnnnnnnnnnnnnnnnnnnnnnnnnnnnnnnnnnnnnnnnnnnnnnnnnnnnnnnnnnnnnnnnnnnnnnnnnnnnnnnnnnnnnnnnnnnnnnnnnnnnnnnnnnnnnnnnnnnnnnnnnnnnnnnnnnnnnnnnnnnnnnnnnnnnnnnnnnnnnnnnnnnnnnnnnnnnnnnnnnnnnnnnnnnnnnnnnnnnnnnnnnnnnnnnnnnnnnnnnnnnnnnnnnnnnnnnnnnnnnnnnnnnnnnnnnnnnnnnnnnnnnnnnnnnnnnnnnnnnnnnnnnnnnnnnnnnnnnnnnnnnnnnnnnnnnnnnnnnnnnnnnnnnnnnnnnnnnnnnnnnnnnnnnnnnnnnnnnnnnnnnnnnnnnnnnnnnnnnnnnnnnnnnnnnnnnnnnnnnnnnnnnnnnnnnnnnnnnnnnnnnnnnnnnnnnnnnnnnnnnnnnnnnnnnnnnnnnnnnnnnnnnnnnnnnnnnnnnnnnnnnnnnnnnnnnnnnnnnnnnnnnnnnnnnnnnnnnnnnnnnnnnnnnnnnnnnnnnnnnnnnnnnnnnnnnnnnnnnnnnnnnnnnnnnnnnnnnnnnnnnnnnnnnnnnnnnnnnnnnnnnnnnnnnnnnnnnnnnnnnnnnnnnnnnnnnnnnnnnnnnnnnnnnnnnnnnnnnnnnnnnnnnnnnnnnnnnnnnnnnnnnnnnnnnnnnnnnnnnnnnnnnnnnnnnnnnnnnnnnnnnnnnnnnnnnnnnnnnnnnnnnnnnnnnnnnnnnnnnnnnnnnnnnnnnnnnnnnnnnnnnnnnnnnnnnnnnnnnnnnnnnnnnnnnnnnnnnnnnnnnnnnnnnnnnnnnnnnnnnnnnnnnnnnnnnnnnnnnnnnnnnnnnnnnnnnnnnnnnnnnnnnnnnnnnnnnnnnnnnnnnnnnnnnnnnnnnnnnnnnnnnnnnnnnnnnnnnnnnnnnnnnnnnnnnnnnnnnnnnnnnnnnnnnnnnnnnnnnnnnnnnnnnnnnnnnnnnnnnnnnnnnnnnnnnnnnnnnnnnnnnnnnnnnnnnnnnnnnnnnnnnnnnnnnnnnnnnnnnnnnnnnnnnnnnnnnnnnnnnnnnnnnnnnnnnnnnnnnnnnnnnnnnnnnnnnnnnnnnnnnnnnnnnnnnnnnnnnnnnnnnnnnnnnnnnnnnnnnnnnnnnnnnnnnnnnnnnnnnnnnnnnnnnnnnnnnnnnnnnnnnnnnnnnnnnnnnnnnnnnnnnnnnnnnnnnnnnnnnnnnnnnnnnnnnnnnnnnnnnnnnnnnnnnnnnnnnnnnnnnnnnnnnnnnnnnnnnnnnnnnnnnnnnnnnnnnnnnnnnnnnnnnnnnnnnnnnnnnnnnnnnnnnnnnnnnnnnnnnnnnnnnnnnnnnnnnnnnnnnnnnnnnnnnnnnnnnnnnnnnnnnnnnnnnnnnnnnnnnnnnnnnnnnnnnnnnnnnnnnnnnnnnnnnnnnnnnnnnnnnnnnnnnnnnnnnnnnnnnnnnnnnnnnnnnnnnnnnnnnnnnnnnnnnnnnnnnnnnnnnnnnnnnnnnnnnnnnnnnnnnnnnnnnnnnnnnnnnnnnnnnnnnnnnnnnnnnnnnnnnnnnnnnnnnnnnnnnnnnnnnnnnnnnnnnnnnnnnnnnnnnnnnnnnnnnnnnnnnnnnnnnnnnnnnnnnnnnnnnnnnnnnnnnnnnnnnnnnnnnnnnnnnnnnnnnnnnnnnnnnnnnnnnnnnnnnnnnnnnnnnnnnnnnnnnnnnnnnnnnnnnnnnnnnnnnnnnnnnnnnnnnnnnnnnnnnnnnnnnnnnnnnnnnnnnnnnnnnnnnnnnnnnnnnnnnnnnnnnnnnnnnnnnnnnnnnnnnnnnnnnnnnnnnnnnnnnnnnnnnnnnnnnnnnnnnnnnnnnnnnnnnnnnnnnnnnnnnnnnnnnnnnnnnnnnnnnnnnnnnnnnnnnnnnnnnnnnnnnnnnnnnnnnnnnnnnnnnnnnnnnnnnnnnnnnnnnnnnnnnnnnnnnnnnnnnnnnnnnnnnnnnnnnnnnnnnnnnnnnnnnnnnnnnnnnnnnnnnnnnnnnnnnnnnnnnnnnnnnnnnnnnnnnnnnnnnnnnnnnnnnnnnnnnnnnnnnnnnnnnnnnnnnnnnnnnnnnnnnnnnnnnnnnnnnnnnnnnnnnnnnnnnnnnnnnnnnnnnnnnnnnnnnnnnnnnnnnnnnnnnnnnnnnnnnnnnnnnnnnnnnnnnnnnnnnnnnnnnnnnnnnnnnnnnnnnnnnnnnnnnnnnnnnnnnnnnnnnnnnnnnnnnnnnnnnnnnnnnnnnnnnnnnnnnnnnnnnnnnnnnnnnnnnnnnnnnnnnnnnnnnnnnnnnnnnnnnnnnnnnnnnnnnnnnnnnnnnnnnnnnnnnnnnnnnnnnnnnnnnnnnnnnnnnnnnnnnnnnnnnnnnnnnnnnnnnnnnnnnnnnnnnnnnnnnnnnnnnnnnnnnnnnnnnnnnnnnnnnnnnnnnnnnnnnnnnnnnnnnnnnnnnnnnnnnnnnnnnnnnnnnnnnnnnnnnnnnnnnnnnnnnnnnnnnnnnnnnnnnnnnnnnnnnnnnnnnnnnnnnnnnnnnnnnnnnnnnnnnnnnnnnnnnnnnnnnnnnnnnnnnnnnnnnnnnnnnnnnnnnnnnnnnnnnnnnnnnnnnnnnnnnnnnnnnnnnnnnnnnnnnnnnnnnnnnnnnnnnnnnnnnnnnnnnnnnnnnnnnnnnnnnnnnnnnnnnnnnnnnnnnnnnnnnnnnnnnnnnnnnnnnnnnnnnnnnnnnnnnnnnnnnnnnnnnnnnnnnnnnnnnnnnnnnnnnnnnnnnnnnnnnnnnnnnnnnnnnnnnnnnnnnnnnnnnnnnnnnnnnnnnnnnnnnnnnnnnnnnnnnnnnnnnnnnnnnnnnnnnnnnnnnnnnnnnnnnnnnnnnnnnnnnnnnnnnnnnnnnnnnnnnnnnnnnnnnnnnnnnnnnnnnnnnnnnnnnnnnnnnnnnnnnnnnnnnnnnnnnnnnnnnnnnnnnnnnnnnnnnnnnnnnnnnnnnnnnnnnnnnnnnnnnnnnnnnnnnnnnnnnnnnnnnnnnnnnnnnnnnnnnnnnnnnnnnnnnnnnnnnnnnnnnnnnnnnnnnnnnnnnnnnnnnnnnnnnnnnnnnnnnnnnnnnnnnnnnnnnnnnnnnnnnnnnnnnnnnnnnnnnnnnnnnnnnnnnnnnnnnnnnnnnnnnnnnnnnnnnnnnnnnnnnnnnnnnnnnnnnnnnnnnnnnnnnnnnnnnnnnnnnnnnnnnnnnnnnnnnnnnnnnnnnnnnnnnnnnnnnnnnnnnnnnnnnnnnnnnnnnnnnnnnnnnnnnnnnnnnnnnnnnnnnnnnnnnnnnnnnnnnnnnnnnnnnnnnnnnnnnnnnnnnnnnnnnnnnnnnnnnnnnnnnnnnnnnnnnnnnnnnnnnnnnnnnnnnnnnnnnnnnnnnnnnnnnnnnnnnnnnnnnnnnnnnnnnnnnnnnnnnnnnnnnnnnnnnnnnnnnnnnnnnnnnnnnnnnnnnnnnnnnnnnnnnnnnnnnnnnnnnnnnnnnnnnnnnnnnnnnnnnnnnnnnnnnnnnnnnnnnnnnnnnnnnnnnnnnnnnnnnnnnnnnnnnnnnnnnnnnnnnnnnnnnnnnnnnnnnnnnnnnnnnnnnnnnnnnnnnnnnnnnnnnnnnnnnnnnnnnnnnnnnnnnnnnnnnnnnnnnnnnnnnnnnnnnnnnnnnnnnnnnnnnnnnnnnnnnnnnnnnnnnnnnnnnnnnnnnnnnnnnnnnnnnnnnnnnnnnnnnnnnnnnnnnnnnnnnnnnnnnnnnnnnnnnnnnnnnnnnnnnnnnnnnnnnnnnnnnnnnnnnnnnnnnnnnnnnnnnnnnnnnnnnnnnnnnnnnnnnnnnnnnnnnnnnnnnnnnnnnnnnnnnnnnnnnnnnnnnnnnnnnnnnnnnnnnnnnnnnnnnnnnnnnnnnnnnnnnnnnnnnnnnnnnnnnnnnnnnnnnnnnnnnnnnnnnnnnnnnnnnnnnnnnnnnnnnnnnnnnnnnnnnnnnnnnnnnnnnnnnnnnnnnnnnnnnnnnnnnnnnnnnnnnnnnnnnnnnnnnnnnnnnnnnnnnnnnnnnnnnnnnnnnnnnnnnnnnnnnnnnnnnnnnnnnnnnnnnnnnnnnnnnnnnnnnnnnnnnnnnnnnnnnnnnnnnnnnnnnnnnnnnnnnnnnnnnnnnnnnnnnnnnnnnnnnnnnnnnnnnnnnnnnnnnnnnnnnnnnnnnnnnnnnnnnnnnnnnnnnnnnnnnnnnnnnnnnnnnnnnnnnnnnnnnnnnnnnnnnnnnnnnnnnnnnnnnnnnnnnnnnnnnnnnnnnnnnnnnnnnnnnnnnnnnnnnnnnnnnnnnnnnnnnnnnnnnnnnnnnnnnnnnnnnnnnnnnnnnnnnnnnnnnnnnnnnnnnnnnnnnnnnnnnnnnnnnnnnnnnnnnnnnnnnnnnnnnnnnnnnnnnnnnnnnnnnnnnnnnnnnnnnnnnnnnnnnnnnnnnnnnnnnnnnnnnnnnnnnnnnnnnnnnnnnnnnnnnnnnnnnnnnnnnnnnnnnnnnnnnnnnnnnnnnnnnnnnnnnnnnnnnnnnnnnnnnnnnnnnnnnnnnnnnnnnnnnnnnnnnnnnnnnnnnnnnnnnnnnnnnnnnnnnnnnnnnnnnnnnnnnnnnnnnnnnnnnnnnnnnnnnnnnnnnnnnnnnnnnnnnnnnnnnnnnnnnnnnnnnnnnnnnnnnnnnnnnnnnnnnnnnnnnnnnnnnnnnnnnnnnnnnnnnnnnnnnnnnnnnnnnnnnnnnnnnnnnnnnnnnnnnnnnnnnnnnnnnnnnnnnnnnnnnnnnnnnnnnnnnnnnnnnnnnnnnnnnnnnnnnnnnnnnnnnnnnnnnnnnnnnnnnnnnnnnnnnnnnnnnnnnnnnnnnnnnnnnnnnnnnnnnnnnnnnnnnnnnnnnnnnnnnnnnnnnnnnnnnnnnnnnnnnnnnnnnnnnnnnnnnnnnnnnnnnnnnnnnnnnnnnnnnnnnnnnnnnnnnnnnnnnnnnnnnnnnnnnnnnnnnnnnnnnnnnnnnnnnnnnnnnnnnnnnnnnnnnnnnnnnnnnnnnnnnnnnnnnnnnnnnnnnnnnnnnnnnnnnnnnnnnnnnnnnnnnnnnnnnnnnnnnnnnnnnnnnnnnnnnnnnnnnnnnnnnnnnnnnnnnnnnnnnnnnnnnnnnnnnnnnnnnnnnnnnnnnnnnnnnnnnnnnnnnnnnnnnnnnnnnnnnnnnnnnnnnnnnnnnnnnnnnnnnnnnnnnnnnnnnnnnnnnnnnnnnnnnnnnnnnnnnnnnnnnnnnnnnnnnnnnnnnnnnnnnnnnnnnnnnnnnnnnnnnnnnnnnnnnnnnnnnnnnnnnnnnnnnnnnnnnnnnnnnnnnnnnnnnnnnnnnnnnnnnnnnnnnnnnnnnnnnnnnnnnnnnnnnnnnnnnnnnnnnnnnnnnnnnnnnnnnnnnnnnnnnnnnnnnnnnnnnnnnnnnnnnnnnnnnnnnnnnnnnnnnnnnnnnnnnnnnnnnnnnnnnnnnnnnnnnnnnnnnnnnnnnnnnnnnnnnnnnnnnnnnnnnnnnnnnnnnnnnnnnnnnnnnnnnnnnnnnnnnnnnnnnnnnnnnnnnnnnnnnnnnnnnnnnnnnnnnnnnnnnnnnnnnnnnnnnnnnnnnnnnnnnnnnnnnnnnnnnnnnnnnnnnnnnnnnnnnnnnnnnnnnnnnnnnnnnnnnnnnnnnnnnnnnnnnnnnnnnnnnnnnnnnnnnnnnnnnnnnnnnnnnnnnnnnnnnnnnnnnnnnnnnnnnnnnnnnnnnnnnnnnnnnnnnnnnnnnnnnnnnnnnnnnnnnnnnnnnnnnnnnnnnnnnnnnnnnnnnnnnnnnnnnnnnnnnnnnnnnnnnnnnnnnnnnnnnnnnnnnnnnnnnnnnnnnnnnnnnnnnnnnnnnnnnnnnnnnnnnnnnnnnnnnnnnnnnnnnnnnnnnnnnnnnnnnnnnnnnnnnnnnnnnnnnnnnnnnnnnnnnnnnnnnnnnnnnnnnnnnnnnnnnnnnnnnnnnnnnnnnnnnnnnnnnnnnnnnnnnnnnnnnnnnnnnnnnnnnnnnnnnnnnnnnnnnnnnnnnnnnnnnnnnnnnnnnnnnnnnnnnnnnnnnnnnnnnnnnnnnnnnnnnnnnnnnnnnnnnnnnnnnnnnnnnnnnnnnnnnnnnnnnnnnnnnnnnnnnnnnnnnnnnnnnnnnnnnnnnnnnnnnnnnnnnnnnnnnnnnnnnnnnnnnnnnnnnnnnnnnnnnnnnnnnnnnnnnnnnnnnnnnnnnnnnnnnnnnnnnnnnnnnnnnnnnnnnnnnnnnnnnnnnnnnnnnnnnnnnnnnnnnnnnnnnnnnnnnnnnnnnnnnnnnnnnnnnnnnnnnnnnnnnnnnnnnnnnnnnnnnnnnnnnnnnnnnnnnnnnnnnnnnnnnnnnnnnnnnnnnnnnnnnnnnnnnnnnnnnnnnnnnnnnnnnnnnnnnnnnnnnnnnnnnnnnnnnnnnnnnnnnnnnnnnnnnnnnnnnnnnnnnnnnnnnnnnnnnnnnnnnnnnnnnnnnnnnnnnnnnnnnnnnnnnnnnnnnnnnnnnnnnnnnnnnnnnnnnnnnnnnnnnnnnnnnnnnnnnnnnnnnnnnnnnnnnnnnnnnnnnnnnnnnnnnnnnnnnnnnnnnnnnnnnnnnnnnnnnnnnnnnnnnnnnnnnnnnnnnnnnnnnnnnnnnnnnnnnnnnnnnnnnnnnnnnnnnnnnnnnnnnnnnnnnnnnnnnnnnnnnnnnnnnnnnnnnnnnnnnnnnnnnnnnnnnnnnnnnnnnnnnnnnnnnnnnnnnnnnnnnnnnnnnnnnnnnnnnnnnnnnnnnnnnnnnnnnnnnnnnnnnnnnnnnnnnnnnnnnnnnnnnnnnnnnnnnnnnnnnnnnnnnnnnnnnnnnnnnnnnnnnnnnnnnnnnnnnnnnnnnnnnnnnnnnnnnnnnnnnnnnnnnnnnnnnnnnnnnnnnnnnnnnnnnnnnnnnnnnnnnnnnnnnnnnnnnnnnnnnnnnnnnnnnnnnnnnnnnnnnnnnnnnnnnnnnnnnnnnnnnnnnnnnnnnnnnnnnnnnnnnnnnnnnnnnnnnnnnnnnnnnnnnnnnnnnnnnnnnnnnnnnnnnnnnnnnnnnnnnnnnnnnnnnnnnnnnnnnnnnnnnnnnnnnnnnnnnnnnnnnnnnnnnnnnnnnnnnnnnnnnnnnnnnnnnnnnnnnnnnnnnnnnnnnnnnnnnnnnnnnnnnnnnnnnnnnnnnnnnnnnnnnnnnnnnnnnnnnnnnnnnnnnnnnnnnnnnnnnnnnnnnnnnnnnnnnnnnnnnnnnnnnnnnnnnnnnnnnnnnnnnnnnnnnnnnnnnnnnnnnnnnnnnnnnnnnnnnnnnnnnnnnnnnnnnnnnnnnnnnnnnnnnnnnnnnnnnnnnnnnnnnnnnnnnnnnnnnnnnnnnnnnnnnnnnnnnnnnnnnnnnnnnnnnnnnnnnnnnnnnnnnnnnnnnnnnnnnnnnnnnnnnnnnnnnnnnnnnnnnnnnnnnnnnnnnnnnnnnnnnnnnnnnnnnnnnnnnnnnnnnnnnnnnnnnnnnnnnnnnnnnnnnnnnnnnnnnnnnnnnnnnnnnnnnnnnnnnnnnnnnnnnnnnnnnnnnnnnnnnnnnnnnnnnnnnnnnnnnnnnnnnnnnnnnnnnnnnnnnnnnnnnnnnnnnnnnnnnnnnnnnnnnnnnnnnnnnnnnnnnnnnnnnnnnnnnnnnnnnnnnnnnnnnnnnnnnnnnnnnnnnnnnnnnnnnnnnnnnnnnnnnnnnnnnnnnnnnnnnnnnnnnnnnnnnnnnnnnnnnnnnnnnnnnnnnnnnnnnnnnnnnnnnnnnnnnnnnnnnnnnnnnnnnnnnnnnnnnnnnnnnnnnnnnnnnnnnnnnnnnnnnnnnnnnnnnnnnnnnnnnnnnnnnnnnnnnnnnnnnnnnnnnnnnnnnnnnnnnnnnnnnnnnnnnnnnnnnnnnnnnnnnnnnnnnnnnnnnnnnnnnnnnnnnnnnnnnnnnnnnnnnnnnnnnnnnnnnnnnnnnnnnnnnnnnnnnnnnnnnnnnnnnnnnnnnnnnnnnnnnnnnnnnnnnnnnnnnnnnnnnnnnnnnnnnnnnnnnnnnnnnnnnnnnnnnnnnnnnnnnnnnnnnnnnnnnnnnnnnnnnnnnnnnnnnnnnnnnnnnnnnnnnnnnnnnnnnnnnnnnnnnnnnnnnnnnnnnnnnnnnnnnnnnnnnnnnnnnnnnnnnnnnnnnnnnnnnnnnnnnnnnnnnnnnnnnnnnnnnnnnnnnnnnnnnnnnnnnnnnnnnnnnnnnnnnnnnnnnnnnnnnnnnnnnnnnnnnnnnnnnnnnnnnnnnnnnnnnnnnnnnnnnnnnnnnnnnnnnnnnnnnnnnnnnnnnnnnnnnnnnnnnnnnnnnnnnnnnnnnnnnnnnnnnnnnnnnnnnnnnnnnnnnnnnnnnnnnnnnnnnnnnnnnnnnnnnnnnnnnnnnnnnnnnnnnnnnnnnnnnnnnnnnnnnnnnnnnnnnnnnnnnnnnnnnnnnnnnnnnnnnnnnnnnnnnnnnnnnnnnnnnnnnnnnnnnnnnnnnnnnnnnnnnnnnnnnnnnnnnnnnnnnnnnnnnnnnnnnnnnnnnnnnnnnnnnnnnnnnnnnnnnnnnnnnnnnnnnnnnnnnnnnnnnnnnnnnnnnnnnnnnnnnnnnnnnnnnnnnnnnnnnnnnnnnnnnnnnnnnnnnnnnnnnnnnnnnnnnnnnnnnnnnnnnnnnnnnnnnnnnnnnnnnnnnnnnnnnnnnnnnnnnnnnnnnnnnnnnnnnnnnnnnnnnnnnnnnnnnnnnnnnnnnnnnnnnnnnnnnnnnnnnnnnnnnnnnnnnnnnnnnnnnnnnnnnnnnnnnnnnnnnnnnnnnnnnnnnnnnnnnnnnnnnnnnnnnnnnnnnnnnnnnnnnnnnnnnnnnnnnnnnnnnnnnnnnnnnnnnnnnnnnnnnnnnnnnnnnnnnnnnnnnnnnnnnnnnnnnnnnnnnnnnnnnnnnnnnnnnnnnnnnnnnnnnnnnnnnnnnnnnnnnnnnnnnnnnnnnnnnnnnnnnnnnnnnnnnnnnnnnnnnnnnnnnnnnnnnnnnnnnnnnnnnnnnnnnnnnnnnnnnnnnnnnnnnnnnnnnnnnnnnnnnnnnnnnnnnnnnnnnnnnnnnnnnnnnnnnnnnnnnnnnnnnnnnnnnnnnnnnnnnnnnnnnnnnnnnnnnnnnnnnnnnnnnnnnnnnnnnnnnnnnnnnnnnnnnnnnnnnnnnnnnnnnnnnnnnnnnnnnnnnnnnnnnnnnnnnnnnnnnnnnnnnnnnnnnnnnnnnnnnnnnnnnnnnnnnnnnnnnnnnnnnnnnnnnnnnnnnnnnnnnnnnnnnnnnnnnnnnnnnnnnnnnnnnnnnnnnnnnnnnnnnnnnnnnnnnnnnnnnnnnnnnnnnnnnnnnnnnnnnnnnnnnnnnnnnnnnnnnnnnnnnnnnnnnnnnnnnnnnnnnnnnnnnnnnnnnnnnnnnnnnnnnnnnnnnnnnnnnnnnnnnnnnnnnnnnnnnnnnnnnnnnnnnnnnnnnnnnnnnnnnnnnnnnnnnnnnnnnnnnnnnnnnnnnnnnnnnnnnnnnnnnnnnnnnnnnnnnnnnnnnnnnnnnnnnnnnnnnnnnnnnnnnnnnnnnnnnnnnnnnnnnnnnnnnnnnnnnnnnnnnnnnnnnnnnnnnnnnnnnnnnnnnnnnnnnnnnnnnnnnnnnnnnnnnnnnnnnnnnnnnnnnnnnnnnnnnnnnnnnnnnnnnnnnnnnnnnnnnnnnnnnnnnnnnnnnnnnnnnnnnnnnnnnnnnnnnnnnnnnnnnnnnnnnnnnnnnnnnnnnnnnnnnnnnnnnnnnnnnnnnnnnnnnnnnnnnnnnnnnnnnnnnnnnnnnnnnnnnnnnnnnnnnnnnnnnnnnnnnnnnnnnnnnnnnnnnnnnnnnnnnnnnnnnnnnnnnnnnnnnnnnnnnnnnnnnnnnnnnnnnnnnnnnnnnnnnnnnnnnnnnnnnnnnnnnnnnnnnnnnnnnnnnnnnnnnnnnnnnnnnnnnnnnnnnnnnnnnnnnnnnnnnnnnnnnnnnnnnnnnnnnnnnnnnnnnnnnnnnnnnnnnnnnnnnnnnnnnnnnnnnnnnnnnnnnnnnnnnnnnnnnnnnnnnnnnnnnnnnnnnnnnnnnnnnnnnnnnnnnnnnnnnnnnnnnnnnnnnnnnnnnnnnnnnnnnnnnnnnnnnnnnnnnnnnnnnnnnnnnnnnnnnnnnnnnnnnnnnnnnnnnnnnnnnnnnnnnnnnnnnnnnnnnnnnnnnnnnnnnnnnnnnnnnnnnnnnnnnnnnnnnnnnnnnnnnnnnnnnnnnnnnnnnnnnnnnnnnnnnnnnnnnnnnnnnnnnnnnnnnnnnnnnnnnnnnnnnnnnnnnnnnnnnnnnnnnnnnnnnnnnnnnnnnnnnnnnnnnnnnnnnnnnnnnnnnnnnnnnnnnnnnnnnnnnnnnnnnnnnnnnnnnnnnnnnnnnnnnnnnnnnnnnnnnnnnnnnnnnnnnnnnnnnnnnnnnnnnnnnnnnnnnnnnnnnnnnnnnnnnnnnnnnnnnnnnnnnnnnnnnnnnnnnnnnnnnnnnnnnnnnnnnnnnnnnnnnnnnnnnnnnnnnnnnnnnnnnnnnnnnnnnnnnnnnnnnnnnnnnnnnnnnnnnnnnnnnnnnnnnnnnnnnnnnnnnnnnnnnnnnnnnnnnnnnnnnnnnnnnnnnnnnnnnnnnnnnnnnnnnnnnnnnnnnnnnnnnnnnnnnnnnnnnnnnnnnnnnnnnnnnnnnnnnnnnnnnnnnnnnnnnnnnnnnnnnnnnnnnnnnnnnnnnnnnnnnnnnnnnnnnnnnnnnnnnnnnnnnnnnnnnnnnnnnnnnnnnnnnnnnnnnnnnnnnnnnnnnnnnnnnnnnnnnnnnnnnnnnnnnnnnnnnnnnnnnnnnnnnnnnnnnnnnnnnnnnnnnnnnnnnnnnnnnnnnnnnnnnnnnnnnnnnnnnnnnnnnnnnnnnnnnnnnnnnnnnnnnnnnnnnnnnnnnnnnnnnnnnnnnnnnnnnnnnnnnnnnnnnnnnnnnnnnnnnnnnnnnnnnnnnnnnnnnnnnnnnnnnnnnnnnnnnnnnnnnnnnnnnnnnnnnnnnnnnnnnnnnnnnnnnnnnnnnnnnnnnnnnnnnnnnnnnnnnnnnnnnnnnnnnnnnnnnnnnnnnnnnnnnnnnnnnnnnnnnnnnnnnnnnnnnnnnnnnnnnnnnnnnnnnnnnnnnnnnnnnnnnnnnnnnnnnnnnnnnnnnnnnnnnnnnnnnnnnnnnnnnnnnnnnnnnnnnnnnnnnnnnnnnnnnnnnnnnnnnnnnnnnnnnnnnnnnnnnnnnnnnnnnnnnnnnnnnnnnnnnnnnnnnnnnnnnnnnnnnnnnnnnnnnnnnnnnnnnnnnnnnnnnnnnnnnnnnnnnnnnnnnnnnnnnnnnnnnnnnnnnnnnnnnnnnnnnnnnnnnnnnnnnnnnnnnnnnnnnnnnnnnnnnnnnnnnnnnnnnnnnnnnnnnnnnnnnnnnnnnnnnnnnnnnnnnnnnnnnnnnnnnnnnnnnnnnnnnnnnnnnnnnnnnnnnnnnnnnnnnnnnnnnnnnnnnnnnnnnnnnnnnnnnnnnnnnnnnnnnnnnnnnnnnnnnnnnnnnnnnnnnnnnnnnnnnnnnnnnnnnnnnnnnnnnnnnnnnnnnnnnnnnnnnnnnnnnnnnnnnnnnnnnnnnnnnnnnnnnnnnnnnnnnnnnnnnnnnnnnnnnnnnnnnnnnnnnnnnnnnnnnnnnnnnnnnnnnnnnnnnnnnnnnnnnnnnnnnnnnnnnnnnnnnnnnnnnnnnnnnnnnnnnnnnnnnnnnnnnnnnnnnnnnnnnnnnnnnnnnnnnnnnnnnnnnnnnnnnnnnnnnnnnnnnnnnnnnnnnnnnnnnnnnnnnnnnnnnnnnnnnnnnnnnnnnnnnnnnnnnnnnnnnnnnnnnnnnnnnnnnnnnnnnnnnnnnnnnnnnnnnnnnnnnnnnnnnnnnnnnnnnnnnnnnnnnnnnnnnnnnnnnnnnnnnnnnnnnnnnnnnnnnnnnnnnnnnnnnnnnnnnnnnnnnnnnnnnnnnnnnnnnnnnnnnnnnnnnnnnnnnnnnnnnnnnnnnnnnnnnnnnnnnnnnnnnnnnnnnnnnnnnnnnnnnnnnnnnnnnnnnnnnnnnnnnnnnnnnnnnnnnnnnnnnnnnnnnnnnnnnnnnnnnnnnnnnnnnnnnnnnnnnnnnnnnnnnnnnnnnnnnnnnnnnnnnnnnnnnnnnnnnnnnnnnnnnnnnnnnnnnnnnnnnnnnnnnnnnnnnnnnnnnnnnnnnnnnnnnnnnnnnnnnnnnnnnnnnnnnnnnnnnnnnnnnnnnnnnnnnnnnnnnnnnnnnnnnnnnnnnnnnnnnnnnnnnnnnnnnnnnnnnnnnnnnnnnnnnnnnnnnnnnnnnnnnnnnnnnnnnnnnnnnnnnnnnnnnnnnnnnnnnnnnnnnnnnnnnnnnnnnnnnnnnnnnnnnnnnnnnnnnnnnnnnnnnnnnnnnnnnnnnnnnnnnnnnnnnnnnnnnnnnnnnnnnnnnnnnnnnnnnnnnnnnnnnnnnnnnnnnnnnnnnnnnnnnnnnnnnnnnnnnnnnnnnnnnnnnnnnnnnnnnnnnnnnnnnnnnnnnnnnnnnnnnnnnnnnnnnnnnnnnnnnnnnnnnnnnnnnnnnnnnnnnnnnnnnnnnnnnnnnnnnnnnnnnnnnnnnnnnnnnnnnnnnnnnnnnnnnnnnnnnnnnnnnnnnnnnnnnnnnnnnnnnnnnnnnnnnnnnnnnnnnnnnnnnnnnnnnnnnnnnnnnnnnnnnnnnnnnnnnnnnnnnnnnnnnnnnnnnnnnnnnnnnnnnnnnnnnnnnnnnnnnnnnnnnnnnnnnnnnnnnnnnnnnnnnnnnnnnnnnnnnnnnnnnnnnnnnnnnnnnnnnnnnnnnnnnnnnnnnnnnnnnnnnnnnnnnnnnnnnnnnnnnnnnnnnnnnnnnnnnnnnnnnnnnnnnnnnnnnnnnnnnnnnnnnnnnnnnnnnnnnnnnnnnnnnnnnnnnnnnnnnnnnnnnnnnnnnnnnnnnnnnnnnnnnnnnnnnnnnnnnnnnnnnnnnnnnnnnnnnnnnnnnnnnnnnnnnnnnnnnnnnnnnnnnnnnnnnnnnnnnnnnnnnnnnnnnnnnnnnnnnnnnnnnnnnnnnnnnnnnnnnnnnnnnnnnnnnnnnnnnnnnnnnnnnnnnnnnnnnnnnnnnnnnnnnnnnnnnnnnnnnnnnnnnnnnnnnnnnnnnnnnnnnnnnnnnnnnnnnnnnnnnnnnnnnnnnnnnnnnnnnnnnnnnnnnnnnnnnnnnnnnnnnnnnnnnnnnnnnnnnnnnnnnnnnnnnnnnnnnnnnnnnnnnnnnnnnnnnnnnnnnnnnnnnnnnnnnnnnnnnnnnnnnnnnnnnnnnnnnnnnnnnnnnnnnnnnnnnnnnnnnnnnnnnnnnnnnnnnnnnnnnnnnnnnnnnnnnnnnnnnnnnnnnnnnnnnnnnnnnnnnnnnnnnnnnnnnnnnnnnnnnnnnnnnnnnnnnnnnnnnnnnnnnnnnnnnnnnnnnnnnnnnnnnnnnnnnnnnnnnnnnnnnnnnnnnnnnnnnnnnnnnnnnnnnnnnnnnnnnnnnnnnnnnnnnnnnnnnnnnnnnnnnnnnnnnnnnnnnnnnnnnnnnnnnnnnnnnnnnnnnnnnnnnnnnnnnnnnnnnnnnnnnnnnnnnnnnnnnnnnnnnnnnnnnnnnnnnnnnnnnnnnnnnnnnnnnnnnnnnnnnnnnnnnnnnnnnnnnnnnnnnnnnnnnnnnnnnnnnnnnnnnnnnnnnnnnnnnnnnnnnnnnnnnnnnnnnnnnnnnnnnnnnnnnnnnnnnnnnnnnnnnnnnnnnnnnnnnnnnnnnnnnnnnnnnnnnnnnnnnnnnnnnnnnnnnnnnnnnnnnnnnnnnnnnnnnnnnnnnnnnnnnnnnnnnnnnnnnnnnnnnnnnnnnnnnnnnnnnnnnnnnnnnnnnnnnnnnnnnnnnnnnnnnnnnnnnnnnnnnnnnnnnnnnnnnnnnnnnnnnnnnnnnnnnnnnnnnnnnnnnnnnnnnnnnnnnnnnnnnnnnnnnnnnnnnnnnnnnnnnnnnnnnnnnnnnnnnnnnnnnnnnnnnnnnnnnnnnnnnnnnnnnnnnnnnnnnnnnnnnnnnnnnnnnnnnnnnnnnnnnnnnnnnnnnnnnnnnnnnnnnnnnnnnnnnnnnnnnnnnnnnnnnnnnnnnnnnnnnnnnnnnnnnnnnnnnnnnnnnnnnnnnnnnnnnnnnnnnnnnnnnnnnnnnnnnnnnnnnnnnnnnnnnnnnnnnnnnnnnnnnnnnnnnnnnnnnnnnnnnnnnnnnnnnnnnnnnnnnnnnnnnnnnnnnnnnnnnnnnnnnnnnnnnnnnnnnnnnnnnnnnnnnnnnnnnnnnnnnnnnnnnnnnnnnnnnnnnnnnnnnnnnnnnnnnnnnnnnnnnnnnnnnnnnnnnnnnnnnnnnnnnnnnnnnnnnnnnnnnnnnnnnnnnnnnnnnnnnnnnnnnnnnnnnnnnnnnnnnnnnnnnnnnnnnnnnnnnnnnnnnnnnnnnnnnnnnnnnnnnnnnnnnnnnnnnnnnnnnnnnnnnnnnnnnnnnnnnnnnnnnnnnnnnnnnnnnnnnnnnnnnnnnnnnnnnnnnnnnnnnnnnnnnnnnnnnnnnnnnnnnnnnnnnnnnnnnnnnnnnnnnnnnnnnnnnnnnnnnnnnnnnnnnnnnnnnnnnnnnnnnnnnnnnnnnnnnnnnnnnnnnnnnnnnnnnnnnnnnnnnnnnnnnnnnnnnnnnnnnnnnnnnnnnnnnnnnnnnnnnnnnnnnnnnnnnnnnnnnnnnnnnnnnnnnnnnnnnnnnnnnnnnnnnnnnnnnnnnnnnnnnnnnnnnnnnnnnnnnnnnnnnnnnnnnnnnnnnnnnnnnnnnnnnnnnnnnnnnnnnnnnnnnnnnnnnnnnnnnnnnnnnnnnnnnnnnnnnnnnnnnnnnnnnnnnnnnnnnnnnnnnnnnnnnnnnnnnnnnnnnnnnnnnnnnnnnnnnnnnnnnnnnnnnnnnnnnnnnnnnnnnnnnnnnnnnnnnnnnnnnnnnnnnnnnnnnnnnnnnnnnnnnnnnnnnnnnnnnnnnnnnnnnnnnnnnnnnnnnnnnnnnnnnnnnnnnnnnnnnnnnnnnnnnnnnnnnnnnnnnnnnnnnnnnnnnnnnnnnnnnnnnnnnnnnnnnnnnnnnnnnnnnnnnnnnnnnnnnnnnnnnnnnnnnnnnnnnnnnnnnnnnnnnnnnnnnnnnnnnnnnnnnnnnnnnnnnnnnnnnnnnnnnnnnnnnnnnnnnnnnnnnnnnnnnnnnnnnnnnnnnnnnnnnnnnnnnnnnnnnnnnnnnnnnnnnnnnnnnnnnnnnnnnnnnnnnnnnnnnnnnnnnnnnnnnnnnnnnnnnnnnnnnnnnnnnnnnnnnnnnnnnnnnnnnnnnnnnnnnnnnnnnnnnnnnnnnnnnnnnnnnnnnnnnnnnnnnnnnnnnnnnnnnnnnnnnnnnnnnnnnnnnnnnnnnnnnnnnnnnnnnnnnnnnnnnnnnnnnnnnnnnnnnnnnnnnnnnnnnnnnnnnnnnnnnnnnnnnnnnnnnnnnnnnnnnnnnnnnnnnnnnnnnnnnnnnnnnnnnnnnnnnnnnnnnnnnnnnnnnnnnnnnnnnnnnnnnnnnnnnnnnnnnnnnnnnnnnnnnnnnnnnnnnnnnnnnnnnnnnnnnnnnnnnnnnnnnnnnnnnnnnnnnnnnnnnnnnnnnnnnnnnnnnnnnnnnnnnnnnnnnnnnnnnnnnnnnnnnnnnnnnnnnnnnnnnnnnnnnnnnnnnnnnnnnnnnnnnnnnnnnnnnnnnnnnnnnnnnnnnnnnnnnnnnnnnnnnnnnnnnnnnnnnnnnnnnnnnnnnnnnnnnnnnnnnnnnnnnnnnnnnnnnnnnnnnnnnnnnnnnnnnnnnnnnnnnnnnnnnnnnnnnnnnnnnnnnnnnnnnnnnnnnnnnnnnnnnnnnnnnnnnnnnnnnnnnnnnnnnnnnnnnnnnnnnnnnnnnnnnnnnnnnnnnnnnnnnnnnnnnnnnnnnnnnnnnnnnnnnnnnnnnnnnnnnnnnnnnnnnnnnnnnnnnnnnnnnnnnnnnnnnnnnnnnnnnnnnnnnnnnnnnnnnnnnnnnnnnnnnnnnnnnnnnnnnnnnnnnnnnnnnnnnnnnnnnnnnnnnnnnnnnnnnnnnnnnnnnnnnnnnnnnnnnnnnnnnnnnnnnnnnnnnnnnnnnnnnnnnnnnnnnnnnnnnnnnnnnnnnnnnnnnnnnnnnnnnnnnnnnnnnnnnnnnnnnnnnnnnnnnnnnnnnnnnnnnnnnnnnnnnnnnnnnnnnnnnnnnnnnnnnnnnnnnnnnnnnnnnnnnnnnnnnnnnnnnnnnnnnnnnnnnnnnnnnnnnnnnnnnnnnnnnnnnnnnnnnnnnnnnnnnnnnnnnnnnnnnnnnnnnnnnnnnnnnnnnnnnnnnnnnnnnnnnnnnnnnnnnnnnnnnnnnnnnnnnnnnnnnnnnnnnnnnnnnnnnnnnnnnnnnnnnnnnnnnnnnnnnnnnnnnnnnnnnnnnnnnnnnnnnnnnnnnnnnnnnnnnnnnnnnnnnnnnnnnnnnnnnnnnnnnnnnnnnnnnnnnnnnnnnnnnnnnnnnnnnnnnnnnnnnnnnnnnnnnnnnnnnnnnnnnnnnnnnnnnnnnnnnnnnnnnnnnnnnnnnnnnnnnnnnnnnnnnnnnnnnnnnnnnnnnnnnnnnnnnnnnnnnnnnnnnnnnnnnnnnnnnnnnnnnnnnnnnnnnnnnnnnnnnnnnnnnnnnnnnnnnnnnnnnnnnnnnnnnnnnnnnnnnnnnnnnnnnnnnnnnnnnnnnnnnnnnnnnnnnnnnnnnnnnnnnnnnnnnnnnnnnnnnnnnnnnnnnnnnnnnnnnnnnnnnnnnnnnnnnnnnnnnnnnnnnnnnnnnnnnnnnnnnnnnnnnnnnnnnnnnnnnnnnnnnnnnnnnnnnnnnnnnnnnnnnnnnnnnnnnnnnnnnnnnnnnnnnnnnnnnnnnnnnnnnnnnnnnnnnnnnnnnnnnnnnnnnnnnnnnnnnnnnnnnnnnnnnnnnnnnnnnnnnnnnnnnnnnnnnnnnnnnnnnnnnnnnnnnnnnnnnnnnnnnnnnnnnnnnnnnnnnnnnnnnnnnnnnnnnnnnnnnnnnnnnnnnnnnnnnnnnnnnnnnnnnnnnnnnnnnnnnnnnnnnnnnnnnnnnnnnnnnnnnnnnnnnnnnnnnnnnnnnnnnnnnnnnnnnnnnnnnnnnnnnnnnnnnnnnnnnnnnnnnnnnnnnnnnnnnnnnnnnnnnnnnnnnnnnnnnnnnnnnnnnnnnnnnnnnnnnnnnnnnnnnnnnnnnnnnnnnnnnnnnnnnnnnnnnnnnnnnnnnnnnnnnnnnnnnnnnnnnnnnnnnnnnnnnnnnnnnnnnnnnnnnnnnnnnnnnnnnnnnnnnnnnnnnnnnnnnnnnnnnnnnnnnnnnnnnnnnnnnnnnnnnnnnnnnnnnnnnnnnnnnnnnnnnnnnnnnnnnnnnnnnnnnnnnnnnnnnnnnnnnnnnnnnnnnnnnnnnnnnnnnnnnnnnnnnnnnnnnnnnnnnnnnnnnnnnnnnnnnnnnnnnnnnnnnnnnnnnnnnnnnnnnnnnnnnnnnnnnnnnnnnnnnnnnnnnnnnnnnnnnnnnnnnnnnnnnnnnnnnnnnnnnnnnnnnnnnnnnnnnnnnnnnnnnnnnnnnnnnnnnnnnnnnnnnnnnnnnnnnnnnnnnnnnnnnnnnnnnnnnnnnnnnnnnnnnnnnnnnnnnnnnnnnnnnnnnnnnnnnnnnnnnnnnnnnnnnnnnnnnnnnnnnnnnnnnnnnnnnnnnnnnnnnnnnnnnnnnnnnnnnnnnnnnnnnnnnnnnnnnnnnnnnnnnnnnnnnnnnnnnnnnnnnnnnnnnnnnnnnnnnnnnnnnnnnnnnnnnnnnnnnnnnnnnnnnnnnnnnnnnnnnnnnnnnnnnnnnnnnnnnnnnnnnnnnnnnnnnnnnnnnnnnnnnnnnnnnnnnnnnnnnnnnnnnnnnnnnnnnnnnnnnnnnnnnnnnnnnnnnnnnnnnnnnnnnnnnnnnnnnnnnnnnnnnnnnnnnnnnnnnnnnnnnnnnnnnnnnnnnnnnnnnnnnnnnnnnnnnnnnnnnnnnnnnnnnnnnnnnnnnnnnnnnnnnnnnnnnnnnnnnnnnnnnnnnnnnnnnnnnnnnnnnnnnnnnnnnnnnnnnnnnnnnnnnnnnnnnnnnnnnnnnnnnnnnnnnnnnnnnnnnnnnnnnnnnnnnnnnnnnnnnnnnnnnnnnnnnnnnnnnnnnnnnnnnnnnnnnnnnnnnnnnnnnnnnnnnnnnnnnnnnnnnnnnnnnnnnnnnnnnnnnnnnnnnnnnnnnnnnnnnnnnnnnnnnnnnnnnnnnnnnnnnnnnnnnnnnnnnnnnnnnnnnnnnnnnnnnnnnnnnnnnnnnnnnnnnnnnnnnnnnnnnnnnnnnnnnnnnnnnnnnnnnnnnnnnnnnnnnnnnnnnnnnnnnnnnnnnnnnnnnnnnnnnnnnnnnnnnnnnnnnnnnnnnnnnnnnnnnnnnnnnnnnnnnnnnnnnnnnnnnnnnnnnnnnnnnnnnnnnnnnnnnnnnnnnnnnnnnnnnnnnnnnnnnnnnnnnnnnnnnnnnnnnnnnnnnnnnnnnnnnnnnnnnnnnnnnnnnnnnnnnnnnnnnnnnnnnnnnnnnnnnnnnnnnnnnnnnnnnnnnnnnnnnnnnnnnnnnnnnnnnnnnnnnnnnnnnnnnnnnnnnnnnnnnnnnnnnnnnnnnnnnnnnnnnnnnnnnnnnnnnnnnnnnnnnnnnnnnnnnnnnnnnnnnnnnnnnnnnnnnnnnnnnnnnnnnnnnnnnnnnnnnnnnnnnnnnnnnnnnnnnnnnnnnnnnnnnnnnnnnnnnnnnnnnnnnnnnnnnnnnnnnnnnnnnnnnnnnnnnnnnnnnnnnnnnnnnnnnnnnnnnnnnnnnnnnnnnnnnnnnnnnnnnnnnnnnnnnnnnnnnnnnnnnnnnnnnnnnnnnnnnnnnnnnnnnnnnnnnnnnnnnnnnnnnnnnnnnnnnnnnnnnnnnnnnnnnnnnnnnnnnnnnnnnnnnnnnnnnnnnnnnnnnnnnnnnnnnnnnnnnnnnnnnnnnnnnnnnnnnnnnnnnnnnnnnnnnnnnnnnnnnnnnnnnnnnnnnnnnnnnnnnnnnnnnnnnnnnnnnnnnnnnnnnnnnnnnnnnnnnnnnnnnnnnnnnnnnnnnnnnnnnnnnnnnnnnnnnnnnnnnnnnnnnnnnnnnnnnnnnnnnnnnnnnnnnnnnnnnnnnnnnnnnnnnnnnnnnnnnnnnnnnnnnnnnnnnnnnnnnnnnnnnnnnnnnnnnnnnnnnnnnnnnnnnnnnnnnnnnnnnnnnnnnnnnnnnnnnnnnnnnnnnnnnnnnnnnnnnnnnnnnnnnnnnnnnnnnnnnnnnnnnnnnnnnnnnnnnnnnnnnnnnnnnnnnnnnnnnnnnnnnnnnnnnnnnnnnnnnnnnnnnnnnnnnnnnnnnnnnnnnnnnnnnnnnnnnnnnnnnnnnnnnnnnnnnnnnnnnnnnnnnnnnnnnnnnnnnnnnnnnnnnnnnnnnnnnnnnnnnnnnnnnnnnnnnnnnnnnnnnnnnnnnnnnnnnnnnnnnnnnnnnnnnnnnnnnnnnnnnnnnnnnnnnnnnnnnnnnnnnnnnnnnnnnnnnnnnnnnnnnnnnnnnnnnnnnnnnnnnnnnnnnnnnnnnnnnnnnnnnnnnnnnnnnnnnnnnnnnnnnnnnnnnnnnnnnnnnnnnnnnnnnnnnnnnnnnnnnnnnnnnnnnnnnnnnnnnnnnnnnnnnnnnnnnnnnnnnnnnnnnnnnnnnnnnnnnnnnnnnnnnnnnnnnnnnnnnnnnnnnnnnnnnnnnnnnnnnnnnnnnnnnnnnnnnnnnnnnnnnnnnnnnnnnnnnnnnnnnnnnnnnnnnnnnnnnnnnnnnnnnnnnnnnnnnnnnnnnnnnnnnnnnnnnnnnnnnnnnnnnnnnnnnnnnnnnnnnnnnnnnnnnnnnnnnnnnnnnnnnnnnnnnnnnnnnnnnnnnnnnnnnnnnnnnnnnnnnnnnnnnnnnnnnnnnnnnnnnnnnnnnnnnnnnnnnnnnnnnnnnnnnnnnnnnnnnnnnnnnnnnnnnnnnnnnnnnnnnnnnnnnnnnnnnnnnnnnnnnnnnnnnnnnnnnnnnnnnnnnnnnnnnnnnnnnnnnnnnnnnnnnnnnnnnnnnnnnnnnnnnnnnnnnnnnnnnnnnnnnnnnnnnnnnnnnnnnnnnnnnnnnnnnnnnnnnnnnnnnnnnnnnnnnnnnnnnnnnnnnnnnnnnnnnnnnnnnnnnnnnnnnnnnnnnnnnnnnnnnnnnnnnnnnnnnnnnnnnnnnnnnnnnnnnnnnnnnnnnnnnnnnnnnnnnnnnnnnnnnnnnnnnnnnnnnnnnnnnnnnnnnnnnnnnnnnnnnnnnnnnnnnnnnnnnnnnnnnnnnnnnnnnnnnnnnnnnnnnnnnnnnnnnnnnnnnnnnnnnnnnnnnnnnnnnnnnnnnnnnnnnnnnnnnnnnnnnnnnnnnnnnnnnnnnnnnnnnnnnnnnnnnnnnnnnnnnnnnnnnnnnnnnnnnnnnnnnnnnnnnnnnnnnnnnnnnnnnnnnnnnnnnnnnnnnnnnnnnnnnnnnnnnnnnnnnnnnnnnnnnnnnnnnnnnnnnnnnnnnnnnnnnnnnnnnnnnnnnnnnnnnnnnnnnnnnnnnnnnnnnnnnnnnnnnnnnnnnnnnnnnnnnnnnnnnnnnnnnnnnnnnnnnnnnnnnnnnnnnnnnnnnnnnnnnnnnnnnnnnnnnnnnnnnnnnnnnnnnnnnnnnnnnnnnnnnnnnnnnnnnnnnnnnnnnnnnnnnnnnnnnnnnnnnnnnnnnnnnnnnnnnnnnnnnnnnnnnnnnnnnnnnnnnnnnnnnnnnnnnnnnnnnnnnnnnnnnnnnnnnnnnnnnnnnnnnnnnnnnnnnnnnnnnnnnnnnnnnnnnnnnnnnnnnnnnnnnnnnnnnnnnnnnnnnnnnnnnnnnnnnnnnnnnnnnnnnnnnnnnnnnnnnnnnnnnnnnnnnnnnnnnnnnnnnnnnnnnnnnnnnnnnnnnnnnnnnnnnnnnnnnnnnnnnnnnnnnnnnnnnnnnnnnnnnnnnnnnnnnnnnnnnnnnnnnnnnnnnnnnnnnnnnnnnnnnnnnnnnnnnnnnnnnnnnnnnnnnnnnnnnnnnnnnnnnnnnnnnnnnnnnnnnnnnnnnnnnnnnnnnnnnnnnnnnnnnnnnnnnnnnnnnnnnnnnnnnnnnnnnnnnnnnnnnnnnnnnnnnnnnnnnnnnnnnnnnnnnnnnnnnnnnnnnnnnnnnnnnnnnnnnnnnnnnnnnnnnnnnnnnnnnnnnnnnnnnnnnnnnnnnnnnnnnnnnnnnnnnnnnnnnnnnnnnnnnnnnnnnnnnnnnnnnnnnnnnnnnnnnnnnnnnnnnnnnnnnnnnnnnnnnnnnnnnnnnnnnnnnnnnnnnnnnnnnnnnnnnnnnnnnnnnnnnnnnnnnnnnnnnnnnnnnnnnnnnnnnnnnnnnnnnnnnnnnnnnnnnnnnnnnnnnnnnnnnnnnnnnnnnnnnnnnnnnnnnnnnnnnnnnnnnnnnnnnnnnnnnnnnnnnnnnnnnnnnnnnnnnnnnnnnnnnnnnnnnnnnnnnnnnnnnnnnnnnnnnnnnnnnnnnnnnnnnnnnnnnnnnnnnnnnnnnnnnnnnnnnnnnnnnnnnnnnnnnnnnnnnnnnnnnnnnnnnnnnnnnnnnnnnnnnnnnnnnnnnnnnnnnnnnnnnnnnnnnnnnnnnnnnnnnnnnnnnnnnnnnnnnnnnnnnnnnnnnnnnnnnnnnnnnnnnnnnnnnnnnnnnnnnnnnnnnnnnnnnnnnnnnnnnnnnnnnnnnnnnnnnnnnnnnnnnnnnnnnnnnnnnnnnnnnnnnnnnnnnnnnnnnnnnnnnnnnnnnnnnnnnnnnnnnnnnnnnnnnnnnnnnnnnnnnnnnnnnnnnnnnnnnnnnnnnnnnnnnnnnnnnnnnnnnnnnnnnnnnnnnnnnnnnnnnnnnnnnnnnnnnnnnnnnnnnnnnnnnnnnnnnnnnnnnnnnnnnnnnnnnnnnnnnnnnnnnnnnnnnnnnnnnnnnnnnnnnnnnnnnnnnnnnnnnnnnnnnnnnnnnnnnnnnnnnnnnnnnnnnnnnnnnnnnnnnnnnnnnnnnnnnnnnnnnnnnnnnnnnnnnnnnnnnnnnnnnnnnnnnnnnnnnnnnnnnnnnnnnnnnnnnnnnnnnnnnnnnnnnnnnnnnnnnnnnnnnnnnnnnnnnnnnnnnnnnnnnnnnnnnnnnnnnnnnnnnnnnnnnnnnnnnnnnnnnnnnnnnnnnnnnnnnnnnnnnnnnnnnnnnnnnnnnnnnnnnnnnnnnnnnnnnnnnnnnnnnnnnnnnnnnnnnnnnnnnnnnnnnnnnnnnnnnnnnnnnnnnnnnnnnnnnnnnnnnnnnnnnnnnnnnnnnnnnnnnnnnnnnnnnnnnnnnnnnnnnnnnnnnnnnnnnnnnnnnnnnnnnnnnnnnnnnnnnnnnnnnnnnnnnnnnnnnnnnnnnnnnnnnnnnnnnnnnnnnnnnnnnnnnnnnnnnnnnnnnnnnnnnnnnnnnnnnnnnnnnnnnnnnnnnnnnnnnnnnnnnnnnnnnnnnnnnnnnnnnnnnnnnnnnnnnnnnnnnnnnnnnnnnnnnnnnnnnnnnnnnnnnnnnnnnnnnnnnnnnnnnnnnnnnnnnnnnnnnnnnnnnnnnnnnnnnnnnnnnnnnnnnnnnnnnnnnnnnnnnnnnnnnnnnnnnnnnnnnnnnnnnnnnnnnnnnnnnnnnnnnnnnnnnnnnnnnnnnnnnnnnnnnnnnnnnnnnnnnnnnnnnnnnnnnnnnnnnnnnnnnnnnnnnnnnnnnnnnnnnnnnnnnnnnnnnnnnnnnnnnnnnnnnnnnnnnnnnnnnnnnnnnnnnnnnnnnnnnnnnnnnnnnnnnnnnnnnnnnnnnnnnnnnnnnnnnnnnnnnnnnnnnnnnnnnnnnnnnnnnnnnnnnnnnnnnnnnnnnnnnnnnnnnnnnnnnnnnnnnnnnnnnnnnnnnnnnnnnnnnnnnnnnnnnnnnnnnnnnnnnnnnnnnnnnnnnnnnnnnnnnnnnnnnnnnnnnnnnnnnnnnnnnnnnnnnnnnnnnnnnnnnnnnnnnnnnnnnnnnnnnnnnnnnnnnnnnnnnnnnnnnnnnnnnnnnnnnnnnnnnnnnnnnnnnnnnnnnnnnnnnnnnnnnnnnnnnnnnnnnnnnnnnnnnnnnnnnnnnnnnnnnnnnnnnnnnnnnnnnnnnnnnnnnnnnnnnnnnnnnnnnnnnnnnnnnnnnnnnnnnnnnnnnnnnnnnnnnnnnnnnnnnnnnnnnnnnnnnnnnnnnnnnnnnnnnnnnnnnnnnnnnnnnnnnnnnnnnnnnnnnnnnnnnnnnnnnnnnnnnnnnnnnnnnnnnnnnnnnnnnnnnnnnnnnnnnnnnnnnnnnnnnnnnnnnnnnnnnnnnnnnnnnnnnnnnnnnnnnnnnnnnnnnnnnnnnnnnnnnnnnnnnnnnnnnnnnnnnnnnnnnnnnnnnnnnnnnnnnnnnnnnnnnnnnnnnnnnnnnnnnnnnnnnnnnnnnnnnnnnnnnnnnnnnnnnnnnnnnnnnnnnnnnnnnnnnnnnnnnnnnnnnnnnnnnnnnnnnnnnnnnnnnnnnnnnnnnnnnnnnnnnnnnnnnnnnnnnnnnnnnnnnnnnnnnnnnnnnnnnnnnnnnnnnnnnnnnnnnnnnnnnnnnnnnnnnnnnnnnnnnnnnnnnnnnnnnnnnnnnnnnnnnnnnnnnnnnnnnnnnnnnnnnnnnnnnnnnnnnnnnnnnnnnnnnnnnnnnnnnnnnnnnnnnnnnnnnnnnnnnnnnnnnnnnnnnnnnnnnnnnnnnnnnnnnnnnnnnnnnnnnnnnnnnnnnnnnnnnnnnnnnnnnnnnnnnnnnnnnnnnnnnnnnnnnnnnnnnnnnnnnnnnnnnnnnnnnnnnnnnnnnnnnnnnnnnnnnnnnnnnnnnnnnnnnnnnnnnnnnnnnnnnnnnnnnnnnnnnnnnnnnnnnnnnnnnnnnnnnnnnnnnnnnnnnnnnnnnnnnnnnnnnnnnnnnnnnnnnnnnnnnnnnnnnnnnnnnnnnnnnnnnnnnnnnnnnnnnnnnnnnnnnnnnnnnnnnnnnnnnnnnnnnnnnnnnnnnnnnnnnnnnnnnnnnnnnnnnnnnnnnnnnnnnnnnnnnnnnnnnnnnnnnnnnnnnnnnnnnnnnnnnnnnnnnnnnnnnnnnnnnnnnnnnnnnnnnnnnnnnnnnnnnnnnnnnnnnnnnnnnnnnnnnnnnnnnnnnnnnnnnnnnnnnnnnnnnnnnnnnnnnnnnnnnnnnnnnnnnnnnnnnnnnnnnnnnnnnnnnnnnnnnnnnnnnnnnnnnnnnnnnnnnnnnnnnnnnnnnnnnnnnnnnnnnnnnnnnnnnnnnnnnnnnnnnnnnnnnnnnnnnnnnnnnnnnnnnnnnnnnnnnnnnnnnnnnnnnnnnnnnnnnnnnnnnnnnnnnnnnnnnnnnnnnnnnnnnnnnnnnnnnnnnnnnnnnnnnnnnnnnnnnnnnnnnnnnnnnnnnnnnnnnnnnnnnnnnnnnnnnnnnnnnnnnnnnnnnnnnnnnnnnnnnnnnnnnnnnnnnnnnnnnnnnnnnnnnnnnnnnnnnnnnnnnnnnnnnnnnnnnnnnnnnnnnnnnnnnnnnnnnnnnnnnnnnnnnnnnnnnnnnnnnnnnnnnnnnnnnnnnnnnnnnnnnnnnnnnnnnnnnnnnnnnnnnnnnnnnnnnnnnnnnnnnnnnnnnnnnnnnnnnnnnnnnnnnnnnnnnnnnnnnnnnnnnnnnnnnnnnnnnnnnnnnnnnnnnnnnnnnnnnnnnnnnnnnnnnnnnnnnnnnnnnnnnnnnnnnnnnnnnnnnnnnnnnnnnnnnnnnnnnnnnnnnnnnnnnnnnnnnnnnnnnnnnnnnnnnnnnnnnnnnnnnnnnnnnnnnnnnnnnnnnnnnnnnnnnnnnnnnnnnnnnnnnnnnnnnnnnnnnnnnnnnnnnnnnnnnnnnnnnnnnnnnnnnnnnnnnnnnnnnnnnnnnnnnnnnnnnnnnnnnnnnnnnnnnnnnnnnnnnnnnnnnnnnnnnnnnnnnnnnnnnnnnnnnnnnnnnnnnnnnnnnnnnnnnnnnnnnnnnnnnnnnnnnnnnnnnnnnnnnnnnnnnnnnnnnnnnnnnnnnnnnnnnnnnnnnnnnnnnnnnnnnnnnnnnnnnnnnnnnnnnnnnnnnnnnnnnnnnnnnnnnnnnnnnnnnnnnnnnnnnnnnnnnnnnnnnnnnnnnnnnnnnnnnnnnnnnnnnnnnnnnnnnnnnnnnnnnnnnnnnnnnnnnnnnnnnnnnnnnnnnnnnnnnnnnnnnnnnnnnnnnnnnnnnnnnnnnnnnnnnnnnnnnnnnnnnnnnnnnnnnnnnnnnnnnnnnnnnnnnnnnnnnnnnnnnnnnnnnnnnnnnnnnnnnnnnnnnnnnnnnnnnnnnnnnnnnnnnnnnnnnnnnnnnnnnnnnnnnnnnnnnnnnnnnnnnnnnnnnnnnnnnnnnnnnnnnnnnnnnnnnnnnnnnnnnnnnnnnnnnnnnnnnnnnnnnnnnnnnnnnnnnnnnnnnnnnnnnnnnnnnnnnnnnnnnnnnnnnnnnnnnnnnnnnnnnnnnnnnnnnnnnnnnnnnnnnnnnnnnnnnnnnnnnnnnnnnnnnnnnnnnnnnnnnnnnnnnnnnnnnnnnnnnnnnnnnnnnnnnnnnnnnnnnnnnnnnnnnnnnnnnnnnnnnnnnnnnnnnnnnnnnnnnnnnnnnnnnnnnnnnnnnnnnnnnnnnnnnnnnnnnnnnnnnnnnnnnnnnnnnnnnnnnnnnnnnnnnnnnnnnnnnnnnnnnnnnnnnnnnnnnnnnnnnnnnnnnnnnnnnnnnnnnnnnnnnnnnnnnnnnnnnnnnnnnnnnnnnnnnnnnnnnnnnnnnnnnnnnnnnnnnnnnnnnnnnnnnnnnnnnnnnnnnnnnnnnnnnnnnnnnnnnnnnnnnnnnnnnnnnnnnnnnnnnnnnnnnnnnnnnnnnnnnnnnnnnnnnnnnnnnnnnnnnnnnnnnnnnnnnnnnnnnnnnnnnnnnnnnnnnnnnnnnnnnnnnnnnnnnnnnnnnnnnnnnnnnnnnnnnnnnnnnnnnnnnnnnnnnnnnnnnnnnnnnnnnnnnnnnnnnnnnnnnnnnnnnnnnnnnnnnnnnnnnnnnnnnnnnnnnnnnnnnnnnnnnnnnnnnnnnnnnnnnnnnnnnnnnnnnnnnnnnnnnnnnnnnnnnnnnnnnnnnnnnnnnnnnnnnnnnnnnnnnnnnnnnnnnnnnnnnnnnnnnnnnnnnnnnnnnnnnnnnnnnnnnnnnnnnnnnnnnnnnnnnnnnnnnnnnnnnnnnnnnnnnnnnnnnnnnnnnnnnnnnnnnnnnnnnnnnnnnnnnnnnnnnnnnnnnnnnnnnnnnnnnnnnnnnnnnnnnnnnnnnnnnnnnnnnnnnnnnnnnnnnnnnnnnnnnnnnnnnnnnnnnnnnnnnnnnnnnnnnnnnnnnnnnnnnnnnnnnnnnnnnnnnnnnnnnnnnnnnnnnnnnnnnnnnnnnnnnnnnnnnnnnnnnnnnnnnnnnnnnnnnnnnnnnnnnnnnnnnnnnnnnnnnnnnnnnnnnnnnnnnnnnnnnnnnnnnnnnnnnnnnnnnnnnnnnnnnnnnnnnnnnnnnnnnnnnnnnnnnnnnnnnnnnnnnnnnnnnnnnnnnnnnnnnnnnnnnnnnnnnnnnnnnnnnnnnnnnnnnnnnnnnnnnnnnnnnnnnnnnnnnnnnnnnnnnnnnnnnnnnnnnnnnnnnnnnnnnnnnnnnnnnnnnnnnnnnnnnnnnnnnnnnnnnnnnnnnnnnnnnnnnnnnnnnnnnnnnnnnnnnnnnnnnnnnnnnnnnnnnnnnnnnnnnnnnnnnnnnnnnnnnnnnnnnnnnnnnnnnnnnnnnnnnnnnnnnnnnnnnnnnnnnnnnnnnnnnnnnnnnnnnnnnnnnnnnnnnnnnnnnnnnnnnnnnnnnnnnnnnnnnnnnnnnnnnnnnnnnnnnnnnnnnnnnnnnnnnnnnnnnnnnnnnnnnnnnnnnnnnnnnnnnnnnnnnnnnnnnnnnnnnnnnnnnnnnnnnnnnnnnnnnnnnnnnnnnnnnnnnnnnnnnnnnnnnnnnnnnnnnnnnnnnnnnnnnnnnnnnnnnnnnnnnnnnnnnnnnnnnnnnnnnnnnnnnnnnnnnnnnnnnnnnnnnnnnnnnnnnnnnnnnnnnnnnnnnnnnnnnnnnnnnnnnnnnnnnnnnnnnnnnnnnnnnnnnnnnnnnnnnnnnnnnnnnnnnnnnnnnnnnnnnnnnnnnnnnnnnnnnnnnnnnnnnnnnnnnnnnnnnnnnnnnnnnnnnnnnnnnnnnnnnnnnnnnnnnnnnnnnnnnnnnnnnnnnnnnnnnnnnnnnnnnnnnnnnnnnnnnnnnnnnnnnnnnnnnnnnnnnnnnnnnnnnnnnnnnnnnnnnnnnnnnnnnnnnnnnnnnnnnnnnnnnnnnnnnnnnnnnnnnnnnnnnnnnnnnnnnnnnnnnnnnnnnnnnnnnnnnnnnnnnnnnnnnnnnnnnnnnnnnnnnnnnnnnnnnnnnnnnnnnnnnnnnnnnnnnnnnnnnnnnnnnnnnnnnnnnnnnnnnnnnnnnnnnnnnnnnnnnnnnnnnnnnnnnnnnnnnnnnnnnnnnnnnnnnnnnnnnnnnnnnnnnnnnnnnnnnnnnnnnnnnnnnnnnnnnnnnnnnnnnnnnnnnnnnnnnnnnnnnnnnnnnnnnnnnnnnnnnnnnnnnnnnnnnnnnnnnnnnnnnnnnnnnnnnnnnnnnnnnnnnnnnnnnnnnnnnnnnnnnnnnnnnnnnnnnnnnnnnnnnnnnnnnnnnnnnnnnnnnnnnnnnnnnnnnnnnnnnnnnnnnnnnnnnnnnnnnnnnnnnnnnnnnnnnnnnnnnnnnnnnnnnnnnnnnnnnnnnnnnnnnnnnnnnnnnnnnnnnnnnnnnnnnnnnnnnnnnnnnnnnnnnnnnnnnnnnnnnnnnnnnnnnnnnnnnnnnnnnnnnnnnnnnnnnnnnnnnnnnnnnnnnnnnnnnnnnnnnnnnnnnnnnnnnnnnnnnnnnnnnnnnnnnnnnnnnnnnnnnnnnnnnnnnnnnnnnnnnnnnnnnnnnnnnnnnnnnnnnnnnnnnnnnnnnnnnnnnnnnnnnnnnnnnnnnnnnnnnnnnnnnnnnnnnnnnnnnnnnnnnnnnnnnnnnnnnnnnnnnnnnnnnnnnnnnnnnnnnnnnnnnnnnnnnnnnnnnnnnnnnnnnnnnnnnnnnnnnnnnnnnnnnnnnnnnnnnnnnnnnnnnnnnnnnnnnnnnnnnnnnnnnnnnnnnnnnnnnnnnnnnnnnnnnnnnnnnnnnnnnnnnnnnnnnnnnnnnnnnnnnnnnnnnnnnnnnnnnnnnnnnnnnnnnnnnnnnnnnnnnnnnnnnnnnnnnnnnnnnnnnnnnnnnnnnnnnnnnnnnnnnnnnnnnnnnnnnnnnnnnnnnnnnnnnnnnnnnnnnnnnnnnnnnnnnnnnnnnnnnnnnnnnnnnnnnnnnnnnnnnnnnnnnnnnnnnnnnnnnnnnnnnnnnnnnnnnnnnnnnnnnnnnnnnnnnnnnnnnnnnnnnnnnnnnnnnnnnnnnnnnnnnnnnnnnnnnnnnnnnnnnnnnnnnnnnnnnnnnnnnnnnnnnnnnnnnnnnnnnnnnnnnnnnnnnnnnnnnnnnnnnnnnnnnnnnnnnnnnnnnnnnnnnnnnnnnnnnnnnnnnnnnnnnnnnnnnnnnnnnnnnnnnnnnnnnnnnnnnnnnnnnnnnnnnnnnnnnnnnnnnnnnnnnnnnnnnnnnnnnnnnnnnnnnnnnnnnnnnnnnnnnnnnnnnnnnnnnnnnnnnnnnnnnnnnnnnnnnnnnnnnnnnnnnnnnnnnnnnnnnnnnnnnnnnnnnnnnnnnnnnnnnnnnnnnnnnnnnnnnnnnnnnnnnnnnnnnnnnnnnnnnnnnnnnnnnnnnnnnnnnnnnnnnnnnnnnnnnnnnnnnnnnnnnnnnnnnnnnnnnnnnnnnnnnnnnnnnnnnnnnnnnnnnnnnnnnnnnnnnnnnnnnnnnnnnnnnnnnnnnnnnnnnnnnnnnnnnnnnnnnnnnnnnnnnnnnnnnnnnnnnnnnnnnnnnnnnnnnnnnnnnnnnnnnnnnnnnnnnnnnnnnnnnnnnnnnnnnnnnnnnnnnnnnnnnnnnnnnnnnnnnnnnnnnnnnnnnnnnnnnnnnnnnnnnnnnnnnnnnnnnnnnnnnnnnnnnnnnnnnnnnnnnnnnnnnnnnnnnnnnnnnnnnnnnnnnnnnnnnnnnnnnnnnnnnnnnnnnnnnnnnnnnnnnnnnnnnnnnnnnnnnnnnnnnnnnnnnnnnnnnnnnnnnnnnnnnnnnnnnnnnnnnnnnnnnnnnnnnnnnnnnnnnnnnnnnnnnnnnnnnnnnnnnnnnnnnnnnnnnnnnnnnnnnnnnnnnnnnnnnnnnnnnnnnnnnnnnnnnnnnnnnnnnnnnnnnnnnnnnnnnnnnnnnnnnnnnnnnnnnnnnnnnnnnnnnnnnnnnnnnnnnnnnnnnnnnnnnnnnnnnnnnnnnnnnnnnnnnnnnnnnnnnnnnnnnnnnnnnnnnnnnnnnnnnnnnnnnnnnnnnnnnnnnnnnnnnnnnnnnnnnnnnnnnnnnnnnnnnnnnnnnnnnnnnnnnnnnnnnnnnnnnnnnnnnnnnnnnnnnnnnnnnnnnnnnnnnnnnnnnnnnnnnnnnnnnnnnnnnnnnnnnnnnnnnnnnnnnnnnnnnnnnnnnnnnnnnnnnnnnnnnnnnnnnnnnnnnnnnnnnnnnnnnnnnnnnnnnnnnnnnnnnnnnnnnnnnnnnnnnnnnnnnnnnnnnnnnnnnnnnnnnnnnnnnnnnnnnnnnnnnnnnnnnnnnnnnnnnnnnnnnnnnnnnnnnnnnnnnnnnnnnnnnnnnnnnnnnnnnnnnnnnnnnnnnnnnnnnnnnnnnnnnnnnnnnnnnnnnnnnnnnnnnnnnnnnnnnnnnnnnnnnnnnnnnnnnnnnnnnnnnnnnnnnnnnnnnnnnnnnnnnnnnnnnnnnnnnnnnnnnnnnnnnnnnnnnnnnnnnnnnnnnnnnnnnnnnnnnnnnnnnnnnnnnnnnnnnnnnnnnnnnnnnnnnnnnnnnnnnnnnnnnnnnnnnnnnnnnnnnnnnnnnnnnnnnnnnnnnnnnnnnnnnnnnnnnnnnnnnnnnnnnnnnnnnnnnnnnnnnnnnnnnnnnnnnnnnnnnnnnnnnnnnnnnnnnnnnnnnnnnnnnnnnnnnnnnnnnnnnnnnnnnnnnnnnnnnnnnnnnnnnnnnnnnnnnnnnnnnnnnnnnnnnnnnnnnnnnnnnnnnnnnnnnnnnnnnnnnnnnnnnnnnnnnnnnnnnnnnnnnnnnnnnnnnnnnnnnnnnnnnnnnnnnnnnnnnnnnnnnnnnnnnnnnnnnnnnnnnnnnnnnnnnnnnnnnnnnnnnnnnnnnnnnnnnnnnnnnnnnnnnnnnnnnnnnnnnnnnnnnnnnnnnnnnnnnnnnnnnnnnnnnnnnnnnnnnnnnnnnnnnnnnnnnnnnnnnnnnnnnnnnnnnnnnnnnnnnnnnnnnnnnnnnnnnnnnnnnnnnnnnnnnnnnnnnnnnnnnnnnnnnnnnnnnnnnnnnnnnnnnnnnnnnnnnnnnnnnnnnnnnnnnnnnnnnnnnnnnnnnnnnnnnnnnnnnnnnnnnnnnnnnnnnnnnnnnnnnnnnnnnnnnnnnnnnnnnnnnnnnnnnnnnnnnnnnnnnnnnnnnnnnnnnnnnnnnnnnnnnnnnnnnnnnnnnnnnnnnnnnnnnnnnnnnnnnnnnnnnnnnnnnnnnnnnnnnnnnnnnnnnnnnnnnnnnnnnnnnnnnnnnnnnnnnnnnnnnnnnnnnnnnnnnnnnnnnnnnnnnnnnnnnnnnnnnnnnnnnnnnnnnnnnnnnnnnnnnnnnnnnnnnnnnnnnnnnnnnnnnnnnnnnnnnnnnnnnnnnnnnnnnnnnnnnnnnnnnnnnnnnnnnnnnnnnnnnnnnnnnnnnnnnnnnnnnnnnnnnnnnnnnnnnnnnnnnnnnnnnnnnnnnnnnnnnnnnnnnnnnnnnnnnnnnnnnnnnnnnnnnnnnnnnnnnnnnnnnnnnnnnnnnnnnnnnnnnnnnnnnnnnnnnnnnnnnnnnnnnnnnnnnnnnnnnnnnnnnnnnnnnnnnnnnnnnnnnnnnnnnnnnnnnnnnnnnnnnnnnnnnnnnnnnnnnnnnnnnnnnnnnnnnnnnnnnnnnnnnnnnnnnnnnnnnnnnnnnnnnnnnnnnnnnnnnnnnnnnnnnnnnnnnnnnnnnnnnnnnnnnnnnnnnnnnnnnnnnnnnnnnnnnnnnnnnnnnnnnnnnnnnnnnnnnnnnnnnnnnnnnnnnnnnnnnnnnnnnnnnnnnnnnnnnnnnnnnnnnnnnnnnnnnnnnnnnnnnnnnnnnnnnnnnnnnnnnnnnnnnnnnnnnnnnnnnnnnnnnnnnnnnnnnnnnnnnnnnnnnnnnnnnnnnnnnnnnnnnnnnnnnnnnnnnnnnnnnnnnnnnnnnnnnnnnnnnnnnnnnnnnnnnnnnnnnnnnnnnnnnnnnnnnnnnnnnnnnnnnnnnnnnnnnnnnnnnnnnnnnnnnnnnnnnnnnnnnnnnnnnnnnnnnnnnnnnnnnnnnnnnnnnnnnnnnnnnnnnnnnnnnnnnnnnnnnnnnnnnnnnnnnnnnnnnnnnnnnnnnnnnnnnnnnnnnnnnnnnnnnnnnnnnnnnnnnnnnnnnnnnnnnnnnnnnnnnnnnnnnnnnnnnnnnnnnnnnnnnnnnnnnnnnnnnnnnnnnnnnnnnnnnnnnnnnnnnnnnnnnnnnnnnnnnnnnnnnnnnnnnnnnnnnnnnnnnnnnnnnnnnnnnnnnnnnnnnnnnnnnnnnnnnnnnnnnnnnnnnnnnnnnnnnnnnnnnnnnnnnnnnnnnnnnnnnnnnnnnnnnnnnnnnnnnnnnnnnnnnnnnnnnnnnnnnnnnnnnnnnnnnnnnnnnnnnnnnnnnnnnnnnnnnnnnnnnnnnnnnnnnnnnnnnnnnnnnnnnnnnnnnnnnnnnnnnnnnnnnnnnnnnnnnnnnnnnnnnnnnnnnnnnnnnnnnnnnnnnnnnnnnnnnnnnnnnnnnnnnnnnnnnnnnnnnnnnnnnnnnnnnnnnnnnnnnnnnnnnnnnnnnnnnnnnnnnnnnnnnnnnnnnnnnnnnnnnnnnnnnnnnnnnnnnnnnnnnnnnnnnnnnnnnnnnnnnnnnnnnnnnnnnnnnnnnnnnnnnnnnnnnnnnnnnnnnnnnnnnnnnnnnnnnnnnnnnnnnnnnnnnnnnnnnnnnnnnnnnnnnnnnnnnnnnnnnnnnnnnnnnnnnnnnnnnnnnnnnnnnnnnnnnnnnnnnnnnnnnnnnnnnnnnnnnnnnnnnnnnnnnnnnnnnnnnnnnnnnnnnnnnnnnnnnnnnnnnnnnnnnnnnnnnnnnnnnnnnnnnnnnnnnnnnnnnnnnnnnnnnnnnnnnnnnnnnnnnnnnnnnnnnnnnnnnnnnnnnnnnnnnnnnnnnnnnnnnnnnnnnnnnnnnnnnnnnnnnnnnnnnnnnnnnnnnnnnnnnnnnnnnnnnnnnnnnnnnnnnnnnnnnnnnnnnnnnnnnnnnnnnnnnnnnnnnnnnnnnnnnnnnnnnnnnnnnnnnnnnnnnnnnnnnnnnnnnnnnnnnnnnnnnnnnnnnnnnnnnnnnnnnnnnnnnnnnnnnnnnnnnnnnnnnnnnnnnnnnnnnnnnnnnnnnnnnnnnnnnnnnnnnnnnnnnnnnnnnnnnnnnnnnnnnnnnnnnnnnnnnnnnnnnnnnnnnnnnnnnnnnnnnnnnnnnnnnnnnnnnnnnnnnnnnnnnnnnnnnnnnnnnnnnnnnnnnnnnnnnnnnnnnnnnnnnnnnnnnnnnnnnnnnnnnnnnnnnnnnnnnnnnnnnnnnnnnnnnnnnnnnnnnnnnnnnnnnnnnnnnnnnnnnnnnnnnnnnnnnnnnnnnnnnnnnnnnnnnnnnnnnnnnnnnnnnnnnnnnnnnnnnnnnnnnnnnnnnnnnnnnnnnnnnnnnnnnnnnnnnnnnnnnnnnnnnnnnnnnnnnnnnnnnnnnnnnnnnnnnnnnnnnnnnnnnnnnnnnnnnnnnnnnnnnnnnnnnnnnnnnnnnnnnnnnnnnnnnnnnnnnnnnnnnnnnnnnnnnnnnnnnnnnnnnnnnnnnnnnnnnnnnnnnnnnnnnnnnnnnnnnnnnnnnnnnnnnnnnnnnnnnnnnnnnnnnnnnnnnnnnnnnnnnnnnnnnnnnnnnnnnnnnnnnnnnnnnnnnnnnnnnnnnnnnnnnnnnnnnnnnnnnnnnnnnnnnnnnnnnnnnnnnnnnnnnnnnnnnnnnnnnnnnnnnnnnnnnnnnnnnnnnnnnnnnnnnnnnnnnnnnnnnnnnnnnnnnnnnnnnnnnnnnnnnnnnnnnnnnnnnnnnnnnnnnnnnnnnnnnnnnnnnnnnnnnnnnnnnnnnnnnnnnnnnnnnnnnnnnnnnnnnnnnnnnnnnnnnnnnnnnnnnnnnnnnnnnnnnnnnnnnnnnnnnnnnnnnnnnnnnnnnnnnnnnnnnnnnnnnnnnnnnnnnnnnnnnnnnnnnnnnnnnnnnnnnnnnnnnnnnnnnnnnnnnnnnnnnnnnnnnnnnnnnnnnnnnnnnnnnnnnnnnnnnnnnnnnnnnnnnnnnnnnnnnnnnnnnnnnnnnnnnnnnnnnnnnnnnnnnnnnnnnnnnnnnnnnnnnnnnnnnnnnnnnnnnnnnnnnnnnnnnnnnnnnnnnnnnnnnnnnnnnnnnnnnnnnnnnnnnnnnnnnnnnnnnnnnnnnnnnnnnnnnnnnnnnnnnnnnnnnnnnnnnnnnnnnnnnnnnnnnnnnnnnnnnnnnnnnnnnnnnnnnnnnnnnnnnnnnnnnnnnnnnnnnnnnnnnnnnnnnnnnnnnnnnnnnnnnnnnnnnnnnnnnnnnnnnnnnnnnnnnnnnnnnnnnnnnnnnnnnnnnnnnnnnnnnnnnnnnnnnnnnnnnnnnnnnnnnnnnnnnnnnnnnnnnnnnnnnnnnnnnnnnnnnnnnnnnnnnnnnnnnnnnnnnnnnnnnnnnnnnnnnnnnnnnnnnnnnnnnnnnnnnnnnnnnnnnnnnnnnnnnnnnnnnnnnnnnnnnnnnnnnnnnnnnnnnnnnnnnnnnnnnnnnnnnnnnnnnnnnnnnnnnnnnnnnnnnnnnnnnnnnnnnnnnnnnnnnnnnnnnnnnnnnnnnnnnnnnnnnnnnnnnnnnnnnnnnnnnnnnnnnnnnnnnnnnnnnnnnnnnnnnnnnnnnnnnnnnnnnnnnnnnnnnnnnnnnnnnnnnnnnnnnnnnnnnnnnnnnnnnnnnnnnnnnnnnnnnnnnnnnnnnnnnnnnnnnnnnnnnnnnnnnnnnnnnnnnnnnnnnnnnnnnnnnnnnnnnnnnnnnnnnnnnnnnnnnnnnnnnnnnnnnnnnnnnnnnnnnnnnnnnnnnnnnnnnnnnnnnnnnnnnnnnnnnnnnnnnnnnnnnnnnnnnnnnnnnnnnnnnnnnnnnnnnnnnnnnnnnnnnnnnnnnnnnnnnnnnnnnnnnnnnnnnnnnnnnnnnnnnnnnnnnnnnnnnnnnnnnnnnnnnnnnnnnnnnnnnnnnnnnnnnnnnnnnnnnnnnnnnnnnnnnnnnnnnnnnnnnnnnnnnnnnnnnnnnnnnnnnnnnnnnnnnnnnnnnnnnnnnnnnnnnnnnnnnnnnnnnnnnnnnnnnnnnnnnnnnnnnnnnnnnnnnnnnnnnnnnnnnnnnnnnnnnnnnnnnnnnnnnnnnnnnnnnnnnnnnnnnnnnnnnnnnnnnnnnnnnnnnnnnnnnnnnnnnnnnnnnnnnnnnnnnnnnnnnnnnnnnnnnnnnnnnnnnnnnnnnnnnnnnnnnnnnnnnnnnnnnnnnnnnnnnnnnnnnnnnnnnnnnnnnnnnnnnnnnnnnnnnnnnnnnnnnnnnnnnnnnnnnnnnnnnnnnnnnnnnnnnnnnnnnnnnnnnnnnnnnnnnnnnnnnnnnnnnnnnnnnnnnnnnnnnnnnnnnnnnnnnnnnnnnnnnnnnnnnnnnnnnnnnnnnnnnnnnnnnnnnnnnnnnnnnnnnnnnnnnnnnnnnnnnnnnnnnnnnnnnnnnnnnnnnnnnnnnnnnnnnnnnnnnnnnnnnnnnnnnnnnnnnnnnnnnnnnnnnnnnnnnnnnnnnnnnnnnnnnnnnnnnnnnnnnnnnnnnnnnnnnnnnnnnnnnnnnnnnnnnnnnnnnnnnnnnnnnnnnnnnnnnnnnnnnnnnnnnnnnnnnnnnnnnnnnnnnnnnnnnnnnnnnnnnnnnnnnnnnnnnnnnnnnnnnnnnnnnnnnnnnnnnnnnnnnnnnnnnnnnnnnnnnnnnnnnnnnnnnnnnnnnnnnnnnnnnnnnnnnnnnnnnnnnnnnnnnnnnnnnnnnnnnnnnnnnnnnnnnnnnnnnnnnnnnnnnnnnnnnnnnnnnnnnnnnnnnnnnnnnnnnnnnnnnnnnnnnnnnnnnnnnnnnnnnnnnnnnnnnnnnnnnnnnnnnnnnnnnnnnnnnnnnnnnnnnnnnnnnnnnnnnnnnnnnnnnnnnnnnnnnnnnnnnnnnnnnnnnnnnnnnnnnnnnnnnnnnnnnnnnnnnnnnnnnnnnnnnnnnnnnnnnnnnnnnnnnnnnnnnnnnnnnnnnnnnnnnnnnnnnnnnnnnnnnnnnnnnnnnnnnnnnnnnnnnnnnnnnnnnnnnnnnnnnnnnnnnnnnnnnnnnnnnnnnnnnnnnnnnnnnnnnnnnnnnnnnnnnnnnnnnnnnnnnnnnnnnnnnnnnnnnnnnnnnnnnnnnnnnnnnnnnnnnnnnnnnnnnnnnnnnnnnnnnnnnnnnnnnnnnnnnnnnnnnnnnnnnnnnnnnnnnnnnnnnnnnnnnnnnnnnnnnnnnnnnnnnnnnnnnnnnnnnnnnnnnnnnnnnnnnnnnnnnnnnnnnnnnnnnnnnnnnnnnnnnnnnnnnnnnnnnnnnnnnnnnnnnnnnnnnnnnnnnnnnnnnnnnnnnnnnnnnnnnnnnnnnnnnnnnnnnnnnnnnnnnnnnnnnnnnnnnnnnnnnnnnnnnnnnnnnnnnnnnnnnnnnnnnnnnnnnnnnnnnnnnnnnnnnnnnnnnnnnnnnnnnnnnnnnnnnnnnnnnnnnnnnnnnnnnnnnnnnnnnnnnnnnnnnnnnnnnnnnnnnnnnnnnnnnnnnnnnnnnnnnnnnnnnnnnnnnnnnnnnnnnnnnnnnnnnnnnnnnnnnnnnnnnnnnnnnnnnnnnnnnnnnnnnnnnnnnnnnnnnnnnnnnnnnnnnnnnnnnnnnnnnnnnnnnnnnnnnnnnnnnnnnnnnnnnnnnnnnnnnnnnnnnnnnnnnnnnnnnnnnnnnnnnnnnnnnnnnnnnnnnnnnnnnnnnnnnnnnnnnnnnnnnnnnnnnnnnnnnnnnnnnnnnnnnnnnnnnnnnnnnnnnnnnnnnnnnnnnnnnnnnnnnnnnnnnnnnnnnnnnnnnnnnnnnnnnnnnnnnnnnnnnnnnnnnnnnnnnnnnnnnnnnnnnnnnnnnnnnnnnnnnnnnnnnnnnnnnnnnnnnnnnnnnnnnnnnnnnnnnnnnnnnnnnnnnnnnnnnnnnnnnnnnnnnnnnnnnnnnnnnnnnnnnnnnnnnnnnnnnnnnnnnnnnnnnnnnnnnnnnnnnnnnnnnnnnnnnnnnnnnnnnnnnnnnnnnnnnnnnnnnnnnnnnnnnnnnnnnnnnnnnnnnnnnnnnnnnnnnnnnnnnnnnnnnnnnnnnnnnnnnnnnnnnnnnnnnnnnnnnnnnnnnnnnnnnnnnnnnnnnnnnnnnnnnnnnnnnnnnnnnnnnnnnnnnnnnnnnnnnnnnnnnnnnnnnnnnnnnnnnnnnnnnnnnnnnnnnnnnnnnnnnnnnnnnnnnnnnnnnnnnnnnnnnnnnnnnnnnnnnnnnnnnnnnnnnnnnnnnnnnnnnnnnnnnnnnnnnnnnnnnnnnnnnnnnnnnnnnnnnnnnnnnnnnnnnnnnnnnnnnnnnnnnnnnnnnnnnnnnnnnnnnnnnnnnnnnnnnnnnnnnnnnnnnnnnnnnnnnnnnnnnnnnnnnnnnnnnnnnnnnnnnnnnnnnnnnnnnnnnnnnnnnnnnnnnnnnnnnnnnnnnnnnnnnnnnnnnnnnnnnnnnnnnnnnnnnnnnnnnnnnnnnnnnnnnnnnnnnnnnnnnnnnnnnnnnnnnnnnnnnnnnnnnnnnnnnnnnnnnnnnnnnnnnnnnnnnnnnnnnnnnnnnnnnnnnnnnnnnnnnnnnnnnnnnnnnnnnnnnnnnnnnnnnnnnnnnnnnnnnnnnnnnnnnnnnnnnnnnnnnnnnnnnnnnnnnnnnnnnnnnnnnnnnnnnnnnnnnnnnnnnnnnnnnnnnnnnnnnnnnnnnnnnnnnnnnnnnnnnnnnnnnnnnnnnnnnnnnnnnnnnnnnnnnnnnnnnnnnnnnnnnnnnnnnnnnnnnnnnnnnnnnnnnnnnnnnnnnnnnnnnnnnnnnnnnnnnnnnnnnnnnnnnnnnnnnnnnnnnnnnnnnnnnnnnnnnnnnnnnnnnnnnnnnnnnnnnnnnnnnnnnnnnnnnnnnnnnnnnnnnnnnnnnnnnnnnnnnnnnnnnnnnnnnnnnnnnnnnnnnnnnnnnnnnnnnnnnnnnnnnnnnnnnnnnnnnnnnnnnnnnnnnnnnnnnnnnnnnnnnnnnnnnnnnnnnnnnnnnnnnnnnnnnnnnnnnnnnnnnnnnnnnnnnnnnnnnnnnnnnnnnnnnnnnnnnnnnnnnnnnnnnnnnnnnnnnnnnnnnnnnnnnnnnnnnnnnnnnnnnnnnnnnnnnnnnnnnnnnnnnnnnnnnnnnnnnnnnnnnnnnnnnnnnnnnnnnnnnnnnnnnnnnnnnnnnnnnnnnnnnnnnnnnnnnnnnnnnnnnnnnnnnnnnnnnnnnnnnnnnnnnnnnnnnnnnnnnnnnnnnnnnnnnnnnnnnnnnnnnnnnnnnnnnnnnnnnnnnnnnnnnnnnnnnnnnnnnnnnnnnnnnnnnnnnnnnnnnnnnnnnnnnnnnnnnnnnnnnnnnnnnnnnnnnnnnnnnnnnnnnnnnnnnnnnnnnnnnnnnnnnnnnnnnnnnnnnnnnnnnnnnnnnnnnnnnnnnnnnnnnnnnnnnnnnnnnnnnnnnnnnnnnnnnnnnnnnnnnnnnnnnnnnnnnnnnnnnnnnnnnnnnnnnnnnnnnnnnnnnnnnnnnnnnnnnnnnnnnnnnnnnnnnnnnnnnnnnnnnnnnnnnnnnnnnnnnnnnnnnnnnnnnnnnnnnnnnnnnnnnnnnnnnnnnnnnnnnnnnnnnnnnnnnnnnnnnnnnnnnnnnnnnnnnnnnnnnnnnnnnnnnnnnnnnnnnnnnnnnnnnnnnnnnnnnnnnnnnnnnnnnnnnnnnnnnnnnnnnnnnnnnnnnnnnnnnnnnnnnnnnnnnnnnnnnnnnnnnnnnnnnnnnnnnnnnnnnnnnnnnnnnnnnnnnnnnnnnnnnnnnnnnnnnnnnnnnnnnnnnnnnnnnnnnnnnnnnnnnnnnnnnnnnnnnnnnnnnnnnnnnnnnnnnnnnnnnnnnnnnnnnnnnnnnnnnnnnnnnnnnnnnnnnnnnnnnnnnnnnnnnnnnnnnnnnnnnnnnnnnnnnnnnnnnnnnnnnnnnnnnnnnnnnnnnnnnnnnnnnnnnnnnnnnnnnnnnnnnnnnnnnnnnnnnnnnnnnnnnnnnnnnnnnnnnnnnnnnnnnnnnnnnnnnnnnnnnnnnnnnnnnnnnnnnnnnnnnnnnnnnnnnnnnnnnnnnnnnnnnnnnnnnnnnnnnnnnnnnnnnnnnnnnnnnnnnnnnnnnnnnnnnnnnnnnnnnnnnnnnnnnnnnnnnnnnnnnnnnnnnnnnnnnnnnnnnnnnnnnnnnnnnnnnnnnnnnnnnnnnnnnnnnnnnnnnnnnnnnnnnnnnnnnnnnnnnnnnnnnnnnnnnnnnnnnnnnnnnnnnnnnnnnnnnnnnnnnnnnnnnnnnnnnnnnnnnnnnnnnnnnnnnnnnnnnnnnnnnnnnnnnnnnnnnnnnnnnnnnnnnnnnnnnnnnnnnnnnnnnnnnnnnnnnnnnnnnnnnnnnnnnnnnnnnnnnnnnnnnnnnnnnnnnnnnnnnnnnnnnnnnnnnnnnnnnnnnnnnnnnnnnnnnnnnnnnnnnnnnnnnnnnnnnnnnnnnnnnnnnnnnnnnnnnnnnnnnnnnnnnnnnnnnnnnnnnnnnnnnnnnnnnnnnnnnnnnnnnnnnnnnnnnnnnnnnnnnnnnnnnnnnnnnnnnnnnnnnnnnnnnnnnnnnnnnnnnnnnnnnnnnnnnnnnnnnnnnnnnnnnnnnnnnnnnnnnnnnnnnnnnnnnnnnnnnnnnnnnnnnnnnnnnnnnnnnnnnnnnnnnnnnnnnnnnnnnnnnnnnnnnnnnnnnnnnnnnnnnnnnnnnnnnnnnnnnnnnnnnnnnnnnnnnnnnnnnnnnnnnnnnnnnnnnnnnnnnnnnnnnnnnnnnnnnnnnnnnnnnnnnnnnnnnnnnnnnnnnnnnnnnnnnnnnnnnnnnnnnnnnnnnnnnnnnnnnnnnnnnnnnnnnnnnnnnnnnnnnnnnnnnnnnnnnnnnnnnnnnnnnnnnnnnnnnnnnnnnnnnnnnnnnnnnnnnnnnnnnnnnnnnnnnnnnnnnnnnnnnnnnnnnnnnnnnnnnnnnnnnnnnnnnnnnnnnnnnnnnnnnnnnnnnnnnnnnnnnnnnnnnnnnnnnnnnnnnnnnnnnnnnnnnnnnnnnnnnnnnnnnnnnnnnnnnnnnnnnnnnnnnnnnnnnnnnnnnnnnnnnnnnnnnnnnnnnnnnnnnnnnnnnnnnnnnnnnnnnnnnnnnnnnnnnnnnnnnnnnnnnnnnnnnnnnnnnnnnnnnnnnnnnnnnnnnnnnnnnnnnnnnnnnnnnnnnnnnnnnnnnnnnnnnnnnnnnnnnnnnnnnnnnnnnnnnnnnnnnnnnnnnnnnnnnnnnnnnnnnnnnnnnnnnnnnnnnnnnnnnnnnnnnnnnnnnnnnnnnnnnnnnnnnnnnnnnnnnnnnnnnnnnnnnnnnnnnnnnnnnnnnnnnnnnnnnnnnnnnnnnnnnnnnnnnnnnnnnnnnnnnnnnnnnnnnnnnnnnnnnnnnnnnnnnnnnnnnnnnnnnnnnnnnnnnnnnnnnnnnnnnnnnnnnnnnnnnnnnnnnnnnnnnnnnnnnnnnnnnnnnnnnnnnnnnnnnnnnnnnnnnnnnnnnnnnnnnnnnnnnnnnnnnnnnnnnnnnnnnnnnnnnnnnnnnnnnnnnnnnnnnnnnnnnnnnnnnnnnnnnnnnnnnnnnnnnnnnnnnnnnnnnnnnnnnnnnnnnnnnnnnnnnnnnnnnnnnnnnnnnnnnnnnnnnnnnnnnnnnnnnnnnnnnnnnnnnnnnnnnnnnnnnnnnnnnnnnnnnnnnnnnnnnnnnnnnnnnnnnnnnnnnnnnnnnnnnnnnnnnnnnnnnnnnnnnnnnnnnnnnnnnnnnnnnnnnnnnnnnnnnnnnnnnnnnnnnnnnnnnnnnnnnnnnnnnnnnnnnnnnnnnnnnnnnnnnnnnnnnnnnnnnnnnnnnnnnnnnnnnnnnnnnnnnnnnnnnnnnnnnnnnnnnnnnnnnnnnnnnnnnnnnnnnnnnnnnnnnnnnnnnnnnnnnnnnnnnnnnnnnnnnnnnnnnnnnnnnnnnnnnnnnnnnnnnnnnnnnnnnnnnnnnnnnnnnnnnnnnnnnnnnnnnnnnnnnnnnnnnnnnnnnnnnnnnnnnnnnnnnnnnnnnnnnnnnnnnnnnnnnnnnnnnnnnnnnnnnnnnnnnnnnnnnnnnnnnnnnnnnnnnnnnnnnnnnnnnnnnnnnnnnnnnnnnnnnnnnnnnnnnnnnnnnnnnnnnnnnnnnnnnnnnnnnnnnnnnnnnnnnnnnnnnnnnnnnnnnnnnnnnnnnnnnnnnnnnnnnnnnnnnnnnnnnnnnnnnnnnnnnnnnnnnnnnnnnnnnnnnnnnnnnnnnnnnnnnnnnnnnnnnnnnnnnnnnnnnnnnnnnnnnnnnnnnnnnnnnnnnnnnnnnnnnnnnnnnnnnnnnnnnnnnnnnnnnnnnnnnnnnnnnnnnnnnnnnnnnnnnnnnnnnnnnnnnnnnnnnnnnnnnnnnnnnnnnnnnnnnnnnnnnnnnnnnnnnnnnnnnnnnnnnnnnnnnnnnnnnnnnnnnnnnnnnnnnnnnnnnnnnnnnnnnnnnnnnnnnnnnnnnnnnnnnnnnnnnnnnnnnnnnnnnnnnnnnnnnnnnnnnnnnnnnnnnnnnnnnnnnnnnnnnnnnnnnnnnnnnnnnnnnnnnnnnnnnnnnnnnnnnnnnnnnnnnnnnnnnnnnnnnnnnnnnnnnnnnnnnnnnnnnnnnnnnnnnnnnnnnnnnnnnnnnnnnnnnnnnnnnnnnnnnnnnnnnnnnnnnnnnnnnnnnnnnnnnnnnnnnnnnnnnnnnnnnnnnnnnnnnnnnnnnnnnnnnnnnnnnnnnnnnnnnnnnnnnnnnnnnnnnnnnnnnnnnnnnnnnnnnnnnnnnnnnnnnnnnnnnnnnnnnnnnnnnnnnnnnnnnnnnnnnnnnnnnnnnnnnnnnnnnnnnnnnnnnnnnnnnnnnnnnnnnnnnnnnnnnnnnnnnnnnnnnnnnnnnnnnnnnnnnnnnnnnnnnnnnnnnnnnnnnnnnnnnnnnnnnnnnnnnnnnnnnnnnnnnnnnnnnnnnnnnnnnnnnnnnnnnnnnnnnnnnnnnnnnnnnnnnnnnnnnnnnnnnnnnnnnnnnnnnnnnnnnnnnnnnnnnnnnnnnnnnnnnnnnnnnnnnnnnnnnnnnnnnnnnnnnnnnnnnnnnnnnnnnnnnnnnnnnnnnnnnnnnnnnnnnnnnnnnnnnnnnnnnnnnnnnnnnnnnnnnnnnnnnnnnnnnnnnnnnnnnnnnnnnnnnnnnnnnnnnnnnnnnnnnnnnnnnnnnnnnnnnnnnnnnnnnnnnnnnnnnnnnnnnnnnnnnnnnnnnnnnnnnnnnnnnnnnnnnnnnnnnnnnnnnnnnnnnnnnnnnnnnnnnnnnnnnnnnnnnnnnnnnnnnnnnnnnnnnnnnnnnnnnnnnnnnnnnnnnnnnnnnnnnnnnnnnnnnnnnnnnnnnnnnnnnnnnnnnnnnnnnnnnnnnnnnnnnnnnnnnnnnnnnnnnnnnnnnnnnnnnnnnnnnnnnnnnnnnnnnnnnnnnnnnnnnnnnnnnnnnnnnnnnnnnnnnnnnnnnnnnnnnnnnnnnnnnnnnnnnnnnnnnnnnnnnnnnnnnnnnnnnnnnnnnnnnnnnnnnnnnnnnnnnnnnnnnnnnnnnnnnnnnnnnnnnnnnnnnnnnnnnnnnnnnnnnnnnnnnnnnnnnnnnnnnnnnnnnnnnnnnnnnnnnnnnnnnnnnnnnnnnnnnnnnnnnnnnnnnnnnnnnnnnnnnnnnnnnnnnnnnnnnnnnnnnnnnnnnnnnnnnnnnnnnnnnnnnnnnnnnnnnnnnnnnnnnnnnnnnnnnnnnnnnnnnnnnnnnnnnnnnnnnnnnnnnnnnnnnnnnnnnnnnnnnnnnnnnnnnnnnnnnnnnnnnnnnnnnnnnnnnnnnnnnnnnnnnnnnnnnnnnnnnnnnnnnnnnnnnnnnnnnnnnnnnnnnnnnnnnnnnnnnnnnnnnnnnnnnnnnnnnnnnnnnnnnnnnnnnnnnnnnnnnnnnnnnnnnnnnnnnnnnnnnnnnnnnnnnnnnnnnnnnnnnnnnnnnnnnnnnnnnnnnnnnnnnnnnnnnnnnnnnnnnnnnnnnnnnnnnnnnnnnnnnnnnnnnnnnnnnnnnnnnnnnnnnnnnnnnnnnnnnnnnnnnnnnnnnnnnnnnnnnnnnnnnnnnnnnnnnnnnnnnnnnnnnnnnnnnnnnnnnnnnnnnnnnnnnnnnnnnnnnnnnnnnnnnnnnnnnnnnnnnnnnnnnnnnnnnnnnnnnnnnnnnnnnnnnnnnnnnnnnnnnnnnnnnnnnnnnnnnnnnnnnnnnnnnnnnnnnnnnnnnnnnnnnnnnnnnnnnnnnnnnnnnnnnnnnnnnnnnnnnnnnnnnnnnnnnnnnnnnnnnnnnnnnnnnnnnnnnnnnnnnnnnnnnnnnnnnnnnnnnnnnnnnnnnnnnnnnnnnnnnnnnnnnnnnnnnnnnnnnnnnnnnnnnnnnnnnnnnnnnnnnnnnnnnnnnnnnnnnnnnnnnnnnnnnnnnnnnnnnnnnnnnnnnnnnnnnnnnnnnnnnnnnnnnnnnnnnnnnnnnnnnnnnnnnnnnnnnnnnnnnnnnnnnnnnnnnnnnnnnnnnnnnnnnnnnnnnnnnnnnnnnnnnnnnnnnnnnnnnnnnnnnnnnnnnnnnnnnnnnnnnnnnnnnnnnnnnnnnnnnnnnnnnnnnnnnnnnnnnnnnnnnnnnnnnnnnnnnnnnnnnnnnnnnnnnnnnnnnnnnnnnnnnnnnnnnnnnnnnnnnnnnnnnnnnnnnnnnnnnnnnnnnnnnnnnnnnnnnnnnnnnnnnnnnnnnnnnnnnnnnnnnnnnnnnnnnnnnnnnnnnnnnnnnnnnnnnnnnnnnnnnnnnnnnnnnnnnnnnnnnnnnnnnnnnnnnnnnnnnnnnnnnnnnnnnnnnnnnnnnnnnnnnnnnnnnnnnnnnnnnnnnnnnnnnnnnnnnnnnnnnnnnnnnnnnnnnnnnnnnnnnnnnnnnnnnnnnnnnnnnnnnnnnnnnnnnnnnnnnnnnnnnnnnnnnnnnnnnnnnnnnnnnnnnnnnnnnnnnnnnnnnnnnnnnnnnnnnnnnnnnnnnnnnnnnnnnnnnnnnnnnnnnnnnnnnnnnnnnnnnnnnnnnnnnnnnnnnnnnnnnnnnnnnnnnnnnnnnnnnnnnnnnnnnnnnnnnnnnnnnnnnnnnnnnnnnnnnnnnnnnnnnnnnnnnnnnnnnnnnnnnnnnnnnnnnnnnnnnnnnnnnnnnnnnnnnnnnnnnnnnnnnnnnnnnnnnnnnnnnnnnnnnnnnnnnnnnnnnnnnnnnnnnnnnnnnnnnnnnnnnnnnnnnnnnnnnnnnnnnnnnnnnnnnnnnnnnnnnnnnnnnnnnnnnnnnnnnnnnnnnnnnnnnnnnnnnnnnnnnnnnnnnnnnnnnnnnnnnnnnnnnnnnnnnnnnnnnnnnnnnnnnnnnnnnnnnnnnnnnnnnnnnnnnnnnnnnnnnnnnnnnnnnnnnnnnnnnnnnnnnnnnnnnnnnnnnnnnnnnnnnnnnnnnnnnnnnnnnnnnnnnnnnnnnnnnnnnnnnnnnnnnnnnnnnnnnnnnnnnnnnnnnnnnnnnnnnnnnnnnnnnnnnnnnnnnnnnnnnnnnnnnnnnnnnnnnnnnnnnnnnnnnnnnnnnnnnnnnnnnnnnnnnnnnnnnnnnnnnnnnnnnnnnnnnnnnnnnnnnnnnnnnnnnnnnnnnnnnnnnnnnnnnnnnnnnnnnnnnnnnnnnnnnnnnnnnnnnnnnnnnnnnnnnnnnnnnnnnnnnnnnnnnnnnnnnnnnnnnnnnnnnnnnnnnnnnnnnnnnnnnnnnnnnnnnnnnnnnnnnnnnnnnnnnnnnnnnnnnnnnnnnnnnnnnnnnnnnnnnnnnnnnnnnnnnnnnnnnnnnnnnnnnnnnnnnnnnnnnnnnnnnnnnnnnnnnnnnnnnnnnnnnnnnnnnnnnnnnnnnnnnnnnnnnnnnnnnnnnnnnnnnnnnnnnnnnnnnnnnnnnnnnnnnnnnnnnnnnnnnnnnnnnnnnnnnnnnnnnnnnnnnnnnnnnnnnnnnnnnnnnnnnnnnnnnnnnnnnnnnnnnnnnnnnnnnnnnnnnnnnnnnnnnnnnnnnnnnnnnnnnnnnnnnnnnnnnnnnnnnnnnnnnnnnnnnnnnnnnnnnnnnnnnnnnnnnnnnnnnnnnnnnnnnnnnnnnnnnnnnnnnnnnnnnnnnnnnnnnnnnnnnnnnnnnnnnnnnnnnnnnnnnnnnnnnnnnnnnnnnnnnnnnnnnnnnnnnnnnnnnnnnnnnnnnnnnnnnnnnnnnnnnnnnnnnnnnnnnnnnnnnnnnnnnnnnnnnnnnnnnnnnnnnnnnnnnnnnnnnnnnnnnnnnnnnnnnnnnnnnnnnnnnnnnnnnnnnnnnnnnnnnnnnnnnnnnnnnnnnnnnnnnnnnnnnnnnnnnnnnnnnnnnnnnnnnnnnnnnnnnnnnnnnnnnnnnnnnnnnnnnnnnnnnnnnnnnnnnnnnnnnnnnnnnnnnnnnnnnnnnnnnnnnnnnnnnnnnnnnnnnnnnnnnnnnnnnnnnnnnnnnnnnnnnnnnnnnnnnnnnnnnnnnnnnnnnnnnnnnnnnnnnnnnnnnnnnnnnnnnnnnnnnnnnnnnnnnnnnnnnnnnnnnnnnnnnnnnnnnnnnnnnnnnnnnnnnnnnnnnnnnnnnnnnnnnnnnnnnnnnnnnnnnnnnnnnnnnnnnnnnnnnnnnnnnnnnnnnnnnnnnnnnnnnnnnnnnnnnnnnnnnnnnnnnnnnnnnnnnnnnnnnnnnnnnnnnnnnnnnnnnnnnnnnnnnnnnnnnnnnnnnnnnnnnnnnnnnnnnnnnnnnnnnnnnnnnnnnnnnnnnnnnnnnnnnnnnnnnnnnnnnnnnnnnnnnnnnnnnnnnnnnnnnnnnnnnnnnnnnnnnnnnnnnnnnnnnnnnnnnnnnnnnnnnnnnnnnnnnnnnnnnnnnnnnnnnnnnnnnnnnnnnnnnnnnnnnnnnnnnnnnnnnnnnnnnnnnnnnnnnnnnnnnnnnnnnnnnnnnnnnnnnnnnnnnnnnnnnnnnnnnnnnnnnnnnnnnnnnnnnnnnnnnnnnnnnnnnnnnnnnnnnnnnnnnnnnnnnnnnnnnnnnnnnnnnnnnnnnnnnnnnnnnnnnnnnnnnnnnnnnnnnnnnnnnnnnnnnnnnnnnnnnnnnnnnnnnnnnnnnnnnnnnnnnnnnnnnnnnnnnnnnnnnnnnnnnnnnnnnnnnnnnnnnnnnnnnnnnnnnnnnnnnnnnnnnnnnnnnnnnnnnnnnnnnnnnnnnnnnnnnnnnnnnnnnnnnnnnnnnnnnnnnnnnnnnnnnnnnnnnnnnnnnnnnnnnnnnnnnnnnnnnnnnnnnnnnnnnnnnnnnnnnnnnnnnnnnnnnnnnnnnnnnnnnnnnnnnnnnnnnnnnnnnnnnnnnnnnnnnnnnnnnnnnnnnnnnnnnnnnnnnnnnnnnnnnnnnnnnnnnnnnnnnnnnnnnnnnnnnnnnnnnnnnnnnnnnnnnnnnnnnnnnnnnnnnnnnnnnnnnnnnnnnnnnnnnnnnnnnnnnnnnnnnnnnnnnnnnnnnnnnnnnnnnnnnnnnnnnnnnnnnnnnnnnnnnnnnnnnnnnnnnnnnnnnnnnnnnnnnnnnnnnnnnnnnnnnnnnnnnnnnnnnnnnnnnnnnnnnnnnnnnnnnnnnnnnnnnnnnnnnnnnnnnnnnnnnnnnnnnnnnnnnnnnnnnnnnnnnnnnnnnnnnnnnnnnnnnnnnnnnnnnnnnnnnnnnnnnnnnnnnnnnnnnnnnnnnnnnnnnnnnnnnnnnnnnnnnnnnnnnnnnnnnnnnnnnnnnnnnnnnnnnnnnnnnnnnnnnnnnnnnnnnnnnnnnnnnnnnnnnnnnnnnnnnnnnnnnnnnnnnnnnnnnnnnnnnnnnnnnnnnnnnnnnnnnnnnnnnnnnnnnnnnnnnnnnnnnnnnnnnnnnnnnnnnnnnnnnnnnnnnnnnnnnnnnnnnnnnnnnnnnnnnnnnnnnnnnnnnnnnnnnnnnnnnnnnnnnnnnnnnnnnnnnnnnnnnnnnnnnnnnnnnnnnnnnnnnnnnnnnnnnnnnnnnnnnnnnnnnnnnnnnnnnnnnnnnnnnnnnnnnnnnnnnnnnnnnnnnnnnnnnnnnnnnnnnnnnnnnnnnnnnnnnnnnnnnnnnnnnnnnnnnnnnnnnnnnnnnnnnnnnnnnnnnnnnnnnnnnnnnnnnnnnnnnnnnnnnnnnnnnnnnnnnnnnnnnnnnnnnnnnnnnnnnnnnnnnnnnnnnnnnnnnnnnnnnnnnnnnnnnnnnnnnnnnnnnnnnnnnnnnnnnnnnnnnnnnnnnnnnnnnnnnnnnnnnnnnnnnnnnnnnnnnnnnnnnnnnnnnnnnnnnnnnnnnnnnnnnnnnnnnnnnnnnnnnnnnnnnnnnnnnnnnnnnnnnnnnnnnnnnnnnnnnnnnnnnnnnnnnnnnnnnnnnnnnnnnnnnnnnnnnnnnnnnnnnnnnnnnnnnnnnnnnnnnnnnnnnnnnnnnnnnnnnnnnnnnnnnnnnnnnnnnnnnnnnnnnnnnnnnnnnnnnnnnnnnnnnnnnnnnnnnnnnnnnnnnnnnnnnnnnnnnnnnnnnnnnnnnnnnnnnnnnnnnnnnnnnnnnnnnnnnnnnnnnnnnnnnnnnnnnnnnnnnnnnnnnnnnnnnnnnnnnnnnnnnnnnnnnnnnnnnnnnnnnnnnnnnnnnnnnnnnnnnnnnnnnnnnnnnnnnnnnnnnnnnnnnnnnnnnnnnnnnnnnnnnnnnnnnnnnnnnnnnnnnnnnnnnnnnnnnnnnnnnnnnnnnnnnnnnnnnnnnnnnnnnnnnnnnnnnnnnnnnnnnnnnnnnnnnnnnnnnnnnnnnnnnnnnnnnnnnnnnnnnnnnnnnnnnnnnnnnnnnnnnnnnnnnnnnnnnnnnnnnnnnnnnnnnnnnnnnnnnnnnnnnnnnnnnnnnnnnnnnnnnnnnnnnnnnnnnnnnnnnnnnnnnnnnnnnnnnnnnnnnnnnnnnnnnnnnnnnnnnnnnnnnnnnnnnnnnnnnnnnnnnnnnnnnnnnnnnnnnnnnnnnnnnnnnnnnnnnnnnnnnnnnnnnnnnnnnnnnnnnnnnnnnnnnnnnnnnnnnnnnnnnnnnnnnnnnnnnnnnnnnnnnnnnnnnnnnnnnnnnnnnnnnnnnnnnnnnnnnnnnnnnnnnnnnnnnnnnnnnnnnnnnnnnnnnnnnnnnnnnnnnnnnnnnnnnnnnnnnnnnnnnnnnnnnnnnnnnnnnnnnnnnnnnnnnnnnnnnnnnnnnnnnnnnnnnnnnnnnnnnnnnnnnnnnnnnnnnnnnnnnnnnnnnnnnnnnnnnnnnnnnnnnnnnnnnnnnnnnnnnnnnnnnnnnnnnnnnnnnnnnnnnnnnnnnnnnnnnnnnnnnnnnnnnnnnnnnnnnnnnnnnnnnnnnnnnnnnnnnnnnnnnnnnnnnnnnnnnnnnnnnnnnnnnnnnnnnnnnnnnnnnnnnnnnnnnnnnnnnnnnnnnnnnnnnnnnnnnnnnnnnnnnnnnnnnnnnnnnnnnnnnnnnnnnnnnnnnnnnnnnnnnnnnnnnnnnnnnnnnnnnnnnnnnnnnnnnnnnnnnnnnnnnnnnnnnnnnnnnnnnnnnnnnnnnnnnnnnnnnnnnnnnnnnnnnnnnnnnnnnnnnnnnnnnnnnnnnnnnnnnnnnnnnnnnnnnnnnnnnnnnnnnnnnnnnnnnnnnnnnnnnnnnnnnnnnnnnnnnnnnnnnnnnnnnnnnnnnnnnnnnnnnnnnnnnnnnnnnnnnnnnnnnnnnnnnnnnnnnnnnnnnnnnnnnnnnnnnnnnnnnnnnnnnnnnnnnnnnnnnnnnnnnnnnnnnnnnnnnnnnnnnnnnnnnnnnnnnnnnnnnnnnnnnnnnnnnnnnnnnnnnnnnnnnnnnnnnnnnnnnnnnnnnnnnnnnnnnnnnnnnnnnnnnnnnnnnnnnnnnnnnnnnnnnnnnnnnnnnnnnnnnnnnnnnnnnnnnnnnnnnnnnnnnnnnnnnnnnnnnnnnnnnnnnnnnnnnnnnnnnnnnnnnnnnnnnnnnnnnnnnnnnnnnnnnnnnnnnnnnnnnnnnnnnnnnnnnnnnnnnnnnnnnnnnnnnnnnnnnnnnnnnnnnnnnnnnnnnnnnnnnnnnnnnnnnnnnnnnnnnnnnnnnnnnnnnnnnnnnnnnnnnnnnnnnnnnnnnnnnnnnnnnnnnnnnnnnnnnnnnnnnnnnnnnnnnnnnnnnnnnnnnnnnnnnnnnnnnnnnnnnnnnnnnnnnnnnnnnnnnnnnnnnnnnnnnnnnnnnnnnnnnnnnnnnnnnnnnnnnnnnnnnnnnnnnnnnnnnnnnnnnnnnnnnnnnnnnnnnnnnnnnnnnnnnnnnnnnnnnnnnnnnnnnnnnnnnnnnnnnnnnnnnnnnnnnnnnnnnnnnnnnnnnnnnnnnnnnnnnnnnnnnnnnnnnnnnnnnnnnnnnnnnnnnnnnnnnnnnnnnnnnnnnnnnnnnnnnnnnnnnnnnnnnnnnnnnnnnnnnnnnnnnnnnnnnnnnnnnnnnnnnnnnnnnnnnnnnnnnnnnnnnnnnnnnnnnnnnnnnnnnnnnnnnnnnnnnnnnnnnnnnnnnnnnnnnnnnnnnnnnnnnnnnnnnnnnnnnnnnnnnnnnnnnnnnnnnnnnnnnnnnnnnnnnnnnnnnnnnnnnnnnnnnnnnnnnnnnnnnnnnnnnnnnnnnnnnnnnnnnnnnnnnnnnnnnnnnnnnnnnnnnnnnnnnnnnnnnnnnnnnnnnnnnnnnnnnnnnnnnnnnnnnnnnnnnnnnnnnnnnnnnnnnnnnnnnnnnnnnnnnnnnnnnnnnnnnnnnnnnnnnnnnnnnnnnnnnnnnnnnnnnnnnnnnnnnnnnnnnnnnnnnnnnnnnnnnnnnnnnnnnnnnnnnnnnnnnnnnnnnnnnnnnnnnnnnnnnnnnnnnnnnnnnnnnnnnnnnnnnnnnnnnnnnnnnnnnnnnnnnnnnnnnnnnnnnnnnnnnnnnnnnnnnnnnnnnnnnnnnnnnnnnnnnnnnnnnnnnnnnnnnnnnnnnnnnnnnnnnnnnnnnnnnnnnnnnnnnnnnnnnnnnnnnnnnnnnnnnnnnnnnnnnnnnnnnnnnnnnnnnnnnnnnnnnnnnnnnnnnnnnnnnnnnnnnnnnnnnnnnnnnnnnnnnnnnnnnnnnnnnnnnnnnnnnnnnnnnnnnnnnnnnnnnnnnnnnnnnnnnnnnnnnnnnnnnnnnnnnnnnnnnnnnnnnnnnnnnnnnnnnnnnnnnnnnnnnnnnnnnnnnnnnnnnnnnnnnnnnnnnnnnnnnnnnnnnnnnnnnnnnnnnnnnnnnnnnnnnnnnnnnnnnnnnnnnnnnnnnnnnnnnnnnnnnnnnnnnnnnnnnnnnnnnnnnnnnnnnnnnnnnnnnnnnnnnnnnnnnnnnnnnnnnnnnnnnnnnnnnnnnnnnnnnnnnnnnnnnnnnnnnnnnnnnnnnnnnnnnnnnnnnnnnnnnnnnnnnnnnnnnnnnnnnnnnnnnnnnnnnnnnnnnnnnnnnnnnnnnnnnnnnnnnnnnnnnnnnnnnnnnnnnnnnnnnnnnnnnnnnnnnnnnnnnnnnnnnnnnnnnnnnnnnnnnnnnnnnnnnnnnnnnnnnnnnnnnnnnnnnnnnnnnnnnnnnnnnnnnnnnnnnnnnnnnnnnnnnnnnnnnnnnnnnnnnnnnnnnnnnnnnnnnnnnnnnnnnnnnnnnnnnnnnnnnnnnnnnnnnnnnnnnnnnnnnnnnnnnnnnnnnnnnnnnnnnnnnnnnnnnnnnnnnnnnnnnnnnnnnnnnnnnnnnnnnnnnnnnnnnnnnnnnnnnnnnnnnnnnnnnnnnnnnnnnnnnnnnnnnnnnnnnnnnnnnnnnnnnnnnnnnnnnnnnnnnnnnnnnnnnnnnnnnnnnnnnnnnnnnnnnnnnnnnnnnnnnnnnnnnnnnnnnnnnnnnnnnnnnnnnnnnnnnnnnnnnnnnnnnnnnnnnnnnnnnnnnnnnnnnnnnnnnnnnnnnnnnnnnnnnnnnnnnnnnnnnnnnnnnnnnnnnnnnnnnnnnnnnnnnnnnnnnnnnnnnnnnnnnnnnnnnnnnnnnnnnnnnnnnnnnnnnnnnnnnnnnnnnnnnnnnnnnnnnnnnnnnnnnnnnnnnnnnnnnnnnnnnnnnnnnnnnnnnnnnnnnnnnnnnnnnnnnnnnnnnnnnnnnnnnnnnnnnnnnnnnnnnnnnnnnnnnnnnnnnnnnnnnnnnnnnnnnnnnnnnnnnnnnnnnnnnnnnnnnnnnnnnnnnnnnnnnnnnnnnnnnnnnnnnnnnnnnnnnnnnnnnnnnnnnnnnnnnnnnnnnnnnnnnnnnnnnnnnnnnnnnnnnnnnnnnnnnnnnnnnnnnnnnnnnnnnnnnnnnnnnnnnnnnnnnnnnnnnnnnnnnnnnnnnnnnnnnnnnnnnnnnnnnnnnnnnnnnnnnnnnnnnnnnnnnnnnnnnnnnnnnnnnnnnnnnnnnnnnnnnnnnnnnnnnnnnnnnnnnnnnnnnnnnnnnnnnnnnnnnnnnnnnnnnnnnnnnnnnnnnnnnnnnnnnnnnnnnnnnnnnnnnnnnnnnnnnnnnnnnnnnnnnnnnnnnnnnnnnnnnnnnnnnnnnnnnnnnnnnnnnnnnnnnnnnnnnnnnnnnnnnnnnnnnnnnnnnnnnnnnnnnnnnnnnnnnnnnnnnnnnnnnnnnnnnnnnnnnnnnnnnnnnnnnnnnnnnnnnnnnnnnnnnnnnnnnnnnnnnnnnnnnnnnnnnnnnnnnnnnnnnnnnnnnnnnnnnnnnnnnnnnnnnnnnnnnnnnnnnnnnnnnnnnnnnnnnnnnnnnnnnnnnnnnnnnnnnnnnnnnnnnnnnnnnnnnnnnnnnnnnnnnnnnnnnnnnnnnnnnnnnnnnnnnnnnnnnnnnnnnnnnnnnnnnnnnnnnnnnnnnnnnnnnnnnnnnnnnnnnnnnnnnnnnnnnnnnnnnnnnnnnnnnnnnnnnnnnnnnnnnnnnnnnnnnnnnnnnnnnnnnnnnnnnnnnnnnnnnnnnnnnnnnnnnnnnnnnnnnnnnnnnnnnnnnnnnnnnnnnnnnnnnnnnnnnnnnnnnnnnnnnnnnnnnnnnnnnnnnnnnnnnnnnnnnnnnnnnnnnnnnnnnnnnnnnnnnnnnnnnnnnnnnnnnnnnnnnnnnnnnnnnnnnnnnnnnnnnnnnnnnnnnnnnnnnnnnnnnnnnnnnnnnnnnnnnnnnnnnnnnnnnnnnnnnnnnnnnnnnnnnnnnnnnnnnnnnnnnnnnnnnnnnnnnnnnnnnnnnnnnnnnnnnnnnnnnnnnnnnnnnnnnnnnnnnnnnnnnnnnnnnnnnnnnnnnnnnnnnnnnnnnnnnnnnnnnnnnnnnnnnnnnnnnnnnnnnnnnnnnnnnnnnnnnnnnnnnnnnnnnnnnnnnnnnnnnnnnnnnnnnnnnnnnnnnnnnnnnnnnnnnnnnnnnnnnnnnnnnnnnnnnnnnnnnnnnnnnnnnnnnnnnnnnnnnnnnnnnnnnnnnnnnnnnnnnnnnnnnnnnnnnnnnnnnnnnnnnnnnnnnnnnnnnnnnnnnnnnnnnnnnnnnnnnnnnnnnnnnnnnnnnnnnnnnnnnnnnnnnnnnnnnnnnnnnnnnnnnnnnnnnnnnnnnnnnnnnnnnnnnnnnnnnnnnnnnnnnnnnnnnnnnnnnnnnnnnnnnnnnnnnnnnnnnnnnnnnnnnnnnnnnnnnnnnnnnnnnnnnnnnnnnnnnnnnnnnnnnnnnnnnnnnnnnnnnnnnnnnnnnnnnnnnnnnnnnnnnnnnnnnnnnnnnnnnnnnnnnnnnnnnnnnnnnnnnnnnnnnnnnnnnnnnnnnnnnnnnnnnnnnnnnnnnnnnnnnnnnnnnnnnnnnnnnnnnnnnnnnnnnnnnnnnnnnnnnnnnnnnnnnnnnnnnnnnnnnnnnnnnnnnnnnnnnnnnnnnnnnnnnnnnnnnnnnnnnnnnnnnnnnnnnnnnnnnnnnnnnnnnnnnnnnnnnnnnnnnnnnnnnnnnnnnnnnnnnnnnnnnnnnnnnnnnnnnnnnnnnnnnnnnnnnnnnnnnnnnnnnnnnnnnnnnnnnnnnnnnnnnnnnnnnnnnnnnnnnnnnnnnnnnnnnnnnnnnnnnnnnnnnnnnnnnnnnnnnnnnnnnnnnnnnnnnnnnnnnnnnnnnnnnnnnnnnnnnnnnnnnnnnnnnnnnnnnnnnnnnnnnnnnnnnnnnnnnnnnnnnnnnnnnnnnnnnnnnnnnnnnnnnnnnnnnnnnnnnnnnnnnnnnnnnnnnnnnnnnnnnnnnnnnnnnnnnnnnnnnnnnnnnnnnnnnnnnnnnnnnnnnnnnnnnnnnnnnnnnnnnnnnnnnnnnnnnnnnnnnnnnnnnnnnnnnnnnnnnnnnnnnnnnnnnnnnnnnnnnnnnnnnnnnnnnnnnnnnnnnnnnnnnnnnnnnnnnnnnnnnnnnnnnnnnnnnnnnnnnnnnnnnnnnnnnnnnnnnnnnnnnnnnnnnnnnnnnnnnnnnnnnnnnnnnnnnnnnnnnnnnnnnnnnnnnnnnnnnnnnnnnnnnnnnnnnnnnnnnnnnnnnnnnnnnnnnnnnnnnnnnnnnnnnnnnnnnnnnnnnnnnnnnnnnnnnnnnnnnnnnnnnnnnnnnnnnnnnnnnnnnnnnnnnnnnnnnnnnnnnnnnnnnnnnnnnnnnnnnnnnnnnnnnnnnnnnnnnnnnnnnnnnnnnnnnnnnnnnnnnnnnnnnnnnnnnnnnnnnnnnnnnnnnnnnnnnnnnnnnnnnnnnnnnnnnnnnnnnnnnnnnnnnnnnnnnnnnnnnnnnnnnnnnnnnnnnnnnnnnnnnnnnnnnnnnnnnnnnnnnnnnnnnnnnnnnnnnnnnnnnnnnnnnnnnnnnnnnnnnnnnnnnnnnnnnnnnnnnnnnnnnnnnnnnnnnnnnnnnnnnnnnnnnnnnnnnnnnnnnnnnnnnnnnnnnnnnnnnnnnnnnnnnnnnnnnnnnnnnnnnnnnnnnnnnnnnnnnnnnnnnnnnnnnnnnnnnnnnnnnnnnnnnnnnnnnnnnnnnnnnnnnnnnnnnnnnnnnnnnnnnnnnnnnnnnnnnnnnnnnnnnnnnnnnnnnnnnnnnnnnnnnnnnnnnnnnnnnnnnnnnnnnnnnnnnnnnnnnnnnnnnnnnnnnnnnnnnnnnnnnnnnnnnnnnnnnnnnnnnnnnnnnnnnnnnnnnnnnnnnnnnnnnnnnnnnnnnnnnnnnnnnnnnnnnnnnnnnnnnnnnnnnnnnnnnnnnnnnnnnnnnnnnnnnnnnnnnnnnnnnnnnnnnnnnnnnnnnnnnnnnnnnnnnnnnnnnnnnnnnnnnnnnnnnnnnnnnnnnnnnnnnnnnnnnnnnnnnnnnnnnnnnnnnnnnnnnnnnnnnnnnnnnnnnnnnnnnnnnnnnnnnnnnnnnnnnnnnnnnnnnnnnnnnnnnnnnnnnnnnnnnnnnnnnnnnnnnnnnnnnnnnnnnnnnnnnnnnnnnnnnnnnnnnnnnnnnnnnnnnnnnnnnnnnnnnnnnnnnnnnnnnnnnnnnnnnnnnnnnnnnnnnnnnnnnnnnnnnnnnnnnnnnnnnnnnnnnnnnnnnnnnnnnnnnnnnnnnnnnnnnnnnnnnnnnnnnnnnnnnnnnnnnnnnnnnnnnnnnnnnnnnnnnnnnnnnnnnnnnnnnnnnnnnnnnnnnnnnnnnnnnnnnnnnnnnnnnnnnnnnnnnnnnnnnnnnnnnnnnnnnnnnnnnnnnnnnnnnnnnnnnnnnnnnnnnnnnnnnnnnnnnnnnnnnnnnnnnnnnnnnnnnnnnnnnnnnnnnnnnnnnnnnnnnnnnnnnnnnnnnnnnnnnnnnnnnnnnnnnnnnnnnnnnnnnnnnnnnnnnnnnnnnnnnnnnnnnnnnnnnnnnnnnnnnnnnnnnnnnnnnnnnnnnnnnnnnnnnnnnnnnnnnnnnnnnnnnnnnnnnnnnnnnnnnnnnnnnnnnnnnnnnnnnnnnnnnnnnnnnnnnnnnnnnnnnnnnnnnnnnnnnnnnnnnnnnnnnnnnnnnnnnnnnnnnnnnnnnnnnnnnnnnnnnnnnnnnnnnnnnnnnnnnnnnnnnnnnnnnnnnnnnnnnnnnnnnnnnnnnnnnnnnnnnnnnnnnnnnnnnnnnnnnnnnnnnnnnnnnnnnnnnnnnnnnnnnnnnnnnnnnnnnnnnnnnnnnnnnnnnnnnnnnnnnnnnnnnnnnnnnnnnnnnnnnnnnnnnnnnnnnnnnnnnnnnnnnnnnnnnnnnnnnnnnnnnnnnnnnnnnnnnnnnnnnnnnnnnnnnnnnnnnnnnnnnnnnnnnnnnnnnnnnnnnnnnnnnnnnnnnnnnnnnnnnnnnnnnnnnnnnnnnnnnnnnnnnnnnnnnnnnnnnnnnnnnnnnnnnnnnnnnnnnnnnnnnnnnnnnnnnnnnnnnnnnnnnnnnnnnnnnnnnnnnnnnnnnnnnnnnnnnnnnnnnnnnnnnnnnnnnnnnnnnnnnnnnnnnnnnnnnnnnnnnnnnnnnnnnnnnnnnnnnnnnnnnnnnnnnnnnnnnnnnnnnnnnnnnnnnnnnnnnnnnnnnnnnnnnnnnnnnnnnnnnnnnnnnnnnnnnnnnnnnnnnnnnnnnnnnnnnnnnnnnnnnnnnnnnnnnnnnnnnnnnnnnnnnnnnnnnnnnnnnnnnnnnnnnnnnnnnnnnnnnnnnnnnnnnnnnnnnnnnnnnnnnnnnnnnnnnnnnnnnnnnnnnnnnnnnnnnnnnnnnnnnnnnnnnnnnnnnnnnnnnnnnnnnnnnnnnnnnnnnnnnnnnnnnnnnnnnnnnnnnnnnnnnnnnnnnnnnnnnnnnnnnnnnnnnnnnnnnnnnnnnnnnnnnnnnnnnnnnnnnnnnnnnnnnnnnnnnnnnnnnnnnnnnnnnnnnnnnnnnnnnnnnnnnnnnnnnnnnnnnnnnnnnnnnnnnnnnnnnnnnnnnnnnnnnnnnnnnnnnnnnnnnnnnnnnnnnnnnnnnnnnnnnnnnnnnnnnnnnnnnnnnnnnnnnnnnnnnnnnnnnnnnnnnnnnnnnnnnnnnnnnnnnnnnnnnnnnnnnnnnnnnnnnnnnnnnnnnnnnnnnnnnnnnnnnnnnnnnnnnnnnnnnnnnnnnnnnnnnnnnnnnnnnnnnnnnnnnnnnnnnnnnnnnnnnnnnnnnnnnnnnnnnnnnnnnnnnnnnnnnnnnnnnnnnnnnnnnnnnnnnnnnnnnnnnnnnnnnnnnnnnnnnnnnnnnnnnnnnnnnnnnnnnnnnnnnnnnnnnnnnnnnnnnnnnnnnnnnnnnnnnnnnnnnnnnnnnnnnnnnnnnnnnnnnnnnnnnnnnnnnnnnnnnnnnnnnnnnnnnnnnnnnnnnnnnnnnnnnnnnnnnnnnnnnnnnnnnnnnnnnnnnnnnnnnnnnnnnnnnnnnnnnnnnnnnnnnnnnnnnnnnnnnnnnnnnnnnnnnnnnnnnnnnnnnnnnnnnnnnnnnnnnnnnnnnnnnnnnnnnnnnnnnnnnnnnnnnnnnnnnnnnnnnnnnnnnnnnnnnnnnnnnnnnnnnnnnnnnnnnnnnnnnnnnnnnnnnnnnnnnnnnnnnnnnnnnnnnnnnnnnnnnnnnnnnnnnnnnnnnnnnnnnnnnnnnnnnnnnnnnnnnnnnnnnnnnnnnnnnnnnnnnnnnnnnnnnnnnnnnnnnnnnnnnnnnnnnnnnnnnnnnnnnnnnnnnnnnnnnnnnnnnnnnnnnnnnnnnnnnnnnnnnnnnnnnnnnnnnnnnnnnnnnnnnnnnnnnnnnnnnnnnnnnnnnnnnnnnnnnnnnnnnnnnnnnnnnnnnnnnnnnnnnnnnnnnnnnnnnnnnnnnnnnnnnnnnnnnnnnnnnnnnnnnnnnnnnnnnnnnnnnnnnnnnnnnnnnnnnnnnnnnnnnnnnnnnnnnnnnnnnnnnnnnnnnnnnnnnnnnnnnnnnnnnnnnnnnnnnnnnnnnnnnnnnnnnnnnnnnnnnnnnnnnnnnnnnnnnnnnnnnnnnnnnnnnnnnnnnnnnnnnnnnnnnnnnnnnnnnnnnnnnnnnnnnnnnnnnnnnnnnnnnnnnnnnnnnnnnnnnnnnnnnnnnnnnnnnnnnnnnnnnnnnnnnnnnnnnnnnnnnnnnnnnnnnnnnnnnnnnnnnnnnnnnnnnnnnnnnnnnnnnnnnnnnnnnnnnnnnnnnnnnnnnnnnnnnnnnnnnnnnnnnnnnnnnnnnnnnnnnnnnnnnnnnnnnnnnnnnnnnnnnnnnnnnnnnnnnnnnnnnnnnnnnnnnnnnnnnnnnnnnnnnnnnnnnnnnnnnnnnnnnnnnnnnnnnnnnnnnnnnnnnnnnnnnnnnnnnnnnnnnnnnnnnnnnnnnnnnnnnnnnnnnnnnnnnnnnnnnnnnnnnnnnnnnnnnnnnnnnnnnnnnnnnnnnnnnnnnnnnnnnnnnnnnnnnnnnnnnnnnnnnnnnnnnnnnnnnnnnnnnnnnnnnnnnnnnnnnnnnnnnnnnnnnnnnnnnnnnnnnnnnnnnnnnnnnnnnnnnnnnnnnnnnnnnnnnnnnnnnnnnnnnnnnnnnnnnnnnnnnnnnnnnnnnnnnnnnnnnnnnnnnnnnnnnnnnnnnnnnnnnnnnnnnnnnnnnnnnnnnnnnnnnnnnnnnnnnnnnnnnnnnnnnnnnnnnnnnnnnnnnnnnnnnnnnnnnnnnnnnnnnnnnnnnnnnnnnnnnnnnnnnnnnnnnnnnnnnnnnnnnnnnnnnnnnnnnnnnnnnnnnnnnnnnnnnnnnnnnnnnnnnnnnnnnnnnnnnnnnnnnnnnnnnnnnnnnnnnnnnnnnnnnnnnnnnnnnnnnnnnnnnnnnnnnnnnnnnnnnnnnnnnnnnnnnnnnnnnnnnnnnnnnnnnnnnnnnnnnnnnnnnnnnnnnnnnnnnnnnnnnnnnnnnnnnnnnnnnnnnnnnnnnnnnnnnnnnnnnnnnnnnnnnnnnnnnnnnnnnnnnnnnnnnnnnnnnnnnnnnnnnnnnnnnnnnnnnnnnnnnnnnnnnnnnnnnnnnnnnnnnnnnnnnnnnnnnnnnnnnnnnnnnnnnnnnnnnnnnnnnnnnnnnnnnnnnnnnnnnnnnnnnnnnnnnnnnnnnnnnnnnnnnnnnnnnnnnnnnnnnnnnnnnnnnnnnnnnnnnnnnnnnnnnnnnnnnnnnnnnnnnnnnnnnnnnnnnnnnnnnnnnnnnnnnnnnnnnnnnnnnnnnnnnnnnnnnnnnnnnnnnnnnnnnnnnnnnnnnnnnnnnnnnnnnnnnnnnnnnnnnnnnnnnnnnnnnnnnnnnnnnnnnnnnnnnnnnnnnnnnnnnnnnnnnnnnnnnnnnnnnnnnnnnnnnnnnnnnnnnnnnnnnnnnnnnnnnnnnnnnnnnnnnnnnnnnnnnnnnnnnnnnnnnnnnnnnnnnnnnnnnnnnnnnnnnnnnnnnnnnnnnnnnnnnnnnnnnnnnnnnnnnnnnnnnnnnnnnnnnnnnnnnnnnnnnnnnnnnnnnnnnnnnnnnnnnnnnnnnnnnnnnnnnnnnnnnnnnnnnnnnnnnnnnnnnnnnnnnnnnnnnnnnnnnnnnnnnnnnnnnnnnnnnnnnnnnnnnnnnnnnnnnnnnnnnnnnnnnnnnnnnnnnnnnnnnnnnnnnnnnnnnnnnnnnnnnnnnnnnnnnnnnnnnnnnnnnnnnnnnnnnnnnnnnnnnnnnnnnnnnnnnnnnnnnnnnnnnnnnnnnnnnnnnnnnnnnnnnnnnnnnnnnnnnnnnnnnnnnnnnnnnnnnnnnnnnnnnnnnnnnnnnnnnnnnnnnnnnnnnnnnnnnnnnnnnnnnnnnnnnnnnnnnnnnnnnnnnnnnnnnnnnnnnnnnnnnnnnnnnnnnnnnnnnnnnnnnnnnnnnnnnnnnnnnnnnnnnnnnnnnnnnnnnnnnnnnnnnnnnnnnnnnnnnnnnnnnnnnnnnnnnnnnnnnnnnnnnnnnnnnnnnnnnnnnnnnnnnnnnnnnnnnnnnnnnnnnnnnnnnnnnnnnnnnnnnnnnnnnnnnnnnnnnnnnnnnnnnnnnnnnnnnnnnnnnnnnnnnnnnnnnnnnnnnnnnnnnnnnnnnnnnnnnnnnnnnnnnnnnnnnnnnnnnnnnnnnnnnnnnnnnnnnnnnnnnnnnnnnnnnnnnnnnnnnnnnnnnnnnnnnnnnnnnnnnnnnnnnnnnnnnnnnnnnnnnnnnnnnnnnnnnnnnnnnnnnnnnnnnnnnnnnnnnnnnnnnnnnnnnnnnnnnnnnnnnnnnnnnnnnnnnnnnnnnnnnnnnnnnnnnnnnnnnnnnnnnnnnnnnnnnnnnnnnnnnnnnnnnnnnnnnnnnnnnnnnnnnnnnnnnnnnnnnnnnnnnnnnnnnnnnnnnnnnnnnnnnnnnnnnnnnnnnnnnnnnnnnnnnnnnnnnnnnnnnnnnnnnnnnnnnnnnnnnnnnnnnnnnnnnnnnnnnnnnnnnnnnnnnnnnnnnnnnnnnnnnnnnnnnnnnnnnnnnnnnnnnnnnnnnnnnnnnnnnnnnnnnnnnnnnnnnnnnnnnnnnnnnnnnnnnnnnnnnnnnnnnnnnnnnnnnnnnnnnnnnnnnnnnnnnnnnnnnnnnnnnnnnnnnnnnnnnnnnnnnnnnnnnnnnnnnnnnnnnnnnnnnnnnnnnnnnnnnnnnnnnnnnnnnnnnnnnnnnnnnnnnnnnnnnnnnnnnnnnnnnnnnnnnnnnnnnnnnnnnnnnnnnnnnnnnnnnnnnnnnnnnnnnnnnnnnnnnnnnnnnnnnnnnnnnnnnnnnnnnnnnnnnnnnnnnnnnnnnnnnnnnnnnnnnnnnnnnnnnnnnnnnnnnnnnnnnnnnnnnnnnnnnnnnnnnnnnnnnnnnnnnnnnnnnnnnnnnnnnnnnnnnnnnnnnnnnnnnnnnnnnnnnnnnnnnnnnnnnnnnnnnnnnnnnnnnnnnnnnnnnnnnnnnnnnnnnnnnnnnnnnnnnnnnnnnnnnnnnnnnnnnnnnnnnnnnnnnnnnnnnnnnnnnnnnnnnnnnnnnnnnnnnnnnnnnnnnnnnnnnnnnnnnnnnnnnnnnnnnnnnnnnnnnnnnnnnnnnnnnnnnnnnnnnnnnnnnnnnnnnnnnnnnnnnnnnnnnnnnnnnnnnnnnnnnnnnnnnnnnnnnnnnnnnnnnnnnnnnnnnnnnnnnnnnnnnnnnnnnnnnnnnnnnnnnnnnnnnnnnnnnnnnnnnnnnnnnnnnnnnnnnnnnnnnnnnnnnnnnnnnnnnnnnnnnnnnnnnnnnnnnnnnnnnnnnnnnnnnnnnnnnnnnnnnnnnnnnnnnnnnnnnnnnnnnnnnnnnnnnnnnnnnnnnnnnnnnnnnnnnnnnnnnnnnnnnnnnnnnnnnnnnnnnnnnnnnnnnnnnnnnnnnnnnnnnnnnnnnnnnnnnnnnnnnnnnnnnnnnnnnnnnnnnnnnnnnnnnnnnnnnnnnnnnnnnnnnnnnnnnnnnnnnnnnnnnnnnnnnnnnnnnnnnnnnnnnnnnnnnnnnnnnnnnnnnnnnnnnnnnnnnnnnnnnnnnnnnnnnnnnnnnnnnnnnnnnnnnnnnnnnnnnnnnnnnnnnnnnnnnnnnnnnnnnnnnnnnnnnnnnnnnnnnnnnnnnnnnnnnnnnnnnnnnnnnnnnnnnnnnnnnnnnnnnnnnnnnnnnnnnnnnnnnnnnnnnnnnnnnnnnnnnnnnnnnnnnnnnnnnnnnnnnnnnnnnnnnnnnnnnnnnnnnnnnnnnnnnnnnnnnnnnnnnnnnnnnnnnnnnnnnnnnnnnnnnnnnnnnnnnnnnnnnnnnnnnnnnnnnnnnnnnnnnnnnnnnnnnnnnnnnnnnnnnnnnnnnnnnnnnnnnnnnnnnnnnnnnnnnnnnnnnnnnnnnnnnnnnnnnnnnnnnnnnnnnnnnnnnnnnnnnnnnnnnnnnnnnnnnnnnnnnnnnnnnnnnnnnnnnnnnnnnnnnnnnnnnnnnnnnnnnnnnnnnnnnnnnnnnnnnnnnnnnnnnnnnnnnnnnnnnnnnnnnnnnnnnnnnnnnnnnnnnnnnnnnnnnnnnnnnnnnnnnnnnnnnnnnnnnnnnnnnnnnnnnnnnnnnnnnnnnnnnnnnnnnnnnnnnnnnnnnnnnnnnnnnnnnnnnnnnnnnnnnnnnnnnnnnnnnnnnnnnnnnnnnnnnnnnnnnnnnnnnnnnnnnnnnnnnnnnnnnnnnnnnnnnnnnnnnnnnnnnnnnnnnnnnnnnnnnnnnnnnnnnnnnnnnnnnnnnnnnnnnnnnnnnnnnnnnnnnnnnnnnnnnnnnnnnnnnnnnnnnnnnnnnnnnnnnnnnnnnnnnnnnnnnnnnnnnnnnnnnnnnnnnnnnnnnnnnnnnnnnnnnnnnnnnnnnnnnnnnnnnnnnnnnnnnnnnnnnnnnnnnnnnnnnnnnnnnnnnnnnnnnnnnnnnnnnnnnnnnnnnnnnnnnnnnnnnnnnnnnnnnnnnnnnnnnnnnnnnnnnnnnnnnnnnnnnnnnnnnnnnnnnnnnnnnnnnnnnnnnnnnnnnnnnnnnnnnnnnnnnnnnnnnnnnnnnnnnnnnnnnnnnnnnnnnnnnnnnnnnnnnnnnnnnnnnnnnnnnnnnnnnnnnnnnnnnnnnnnnnnnnnnnnnnnnnnnnnnnnnnnnnnnnnnnnnnnnnnnnnnnnnnnnnnnnnnnnnnnnnnnnnnnnnnnnnnnnnnnnnnnnnnnnnnnnnnnnnnnnnnnnnnnnnnnnnnnnnnnnnnnnnnnnnnnnnnnnnnnnnnnnnnnnnnnnnnnnnnnnnnnnnnnnnnnnnnnnnnnnnnnnnnnnnnnnnnnnnnnnnnnnnnnnnnnnnnnnnnnnnnnnnnnnnnnnnnnnnnnnnnnnnnnnnnnnnnnnnnnnnnnnnnnnnnnnnnnnnnnnnnnnnnnnnnnnnnnnnnnnnnnnnnnnnnnnnnnnnnnnnnnnnnnnnnnnnnnnnnnnnnnnnnnnnnnnnnnnnnnnnnnnnnnnnnnnnnnnnnnnnnnnnnnnnnnnnnnnnnnnnnnnnnnnnnnnnnnnnnnnnnnnnnnnnnnnnnnnnnnnnnnnnnnnnnnnnnnnnnnnnnnnnnnnnnnnnnnnnnnnnnnnnnnnnnnnnnnnnnnnnnnnnnnnnnnnnnnnnnnnnnnnnnnnnnnnnnnnnnnnnnnnnnnnnnnnnnnnnnnnnnnnnnnnnnnnnnnnnnnnnnnnnnnnnnnnnnnnnnnnnnnnnnnnnnnnnnnnnnnnnnnnnnnnnnnnnnnnnnnnnnnnnnnnnnnnnnnnnnnnnnnnnnnnnnnnnnnnnnnnnnnnnnnnnnnnnnnnnnnnnnnnnnnnnnnnnnnnnnnnnnnnnnnnnnnnnnnnnnnnnnnnnnnnnnnnnnnnnnnnnnnnnnnnnnnnnnnnnnnnnnnnnnnnnnnnnnnnnnnnnnnnnnnnnnnnnnnnnnnnnnnnnnnnnnnnnnnnnnnnnnnnnnnnnnnnnnnnnnnnnnnnnnnnnnnnnnnnnnnnnnnnnnnnnnnnnnnnnnnnnnnnnnnnnnnnnnnnnnnnnnnnnnnnnnnnnnnnnnnnnnnnnnnnnnnnnnnnnnnnnnnnnnnnnnnnnnnnnnnnnnnnnnnnnnnnnnnnnnnnnnnnnnnnnnnnnnnnnnnnnnnnnnnnnnnnnnnnnnnnnnnnnnnnnnnnnnnnnnnnnnnnnnnnnnnnnnnnnnnnnnnnnnnnnnnnnnnnnnnnnnnnnnnnnnnnnnnnnnnnnnnnnnnnnnnnnnnnnnnnnnnnnnnnnnnnnnnnnnnnnnnnnnnnnnnnnnnnnnnnnnnnnnnnnnnnnnnnnnnnnnnnnnnnnnnnnnnnnnnnnnnnnnnnnnnnnnnnnnnnnnnnnnnnnnnnnnnnnnnnnnnnnnnnnnnnnnnnnnnnnnnnnnnnnnnnnnnnnnnnnnnnnnnnnnnnnnnnnnnnnnnnnnnnnnnnnnnnnnnnnnnnnnnnnnnnnnnnnnnnnnnnnnnnnnnnnnnnnnnnnnnnnnnnnnnnnnnnnnnnnnnnnnnnnnnnnnnnnnnnnnnnnnnnnnnnnnnnnnnnnnnnnnnnnnnnnnnnnnnnnnnnnnnnnnnnnnnnnnnnnnnnnnnnnnnnnnnnnnnnnnnnnnnnnnnnnnnnnnnnnnnnnnnnnnnnnnnnnnnnnnnnnnnnnnnnnnnnnnnnnnnnnnnnnnnnnnnnnnnnnnnnnnnnnnnnnnnnnnnnnnnnnnnnnnnnnnnnnnnnnnnnnnnnnnnnnnnnnnnnnnnnnnnnnnnnnnnnnnnnnnnnnnnnnnnnnnnnnnnnnnnnnnnnnnnnnnnnnnnnnnnnnnnnnnnnnnnnnnnnnnnnnnnnnnnnnnnnnnnnnnnnnnnnnnnnnnnnnnnnnnnnnnnnnnnnnnnnnnnnnnnnnnnnnnnnnnnnnnnnnnnnnnnnnnnnnnnnnnnnnnnnnnnnnnnnnnnnnnnnnnnnnnnnnnnnnnnnnnnnnnnnnnnnnnnnnnnnnnnnnnnnnnnnnnnnnnnnnnnnnnnnnnnnnnnnnnnnnnnnnnnnnnnnnnnnnnnnnnnnnnnnnnnnnnnnnnnnnnnnnnnnnnnnnnnnnnnnnnnnnnnnnnnnnnnnnnnnnnnnnnnnnnnnnnnnnnnnnnnnnnnnnnnnnnnnnnnnnnnnnnnnnnnnnnnnnnnnnnnnnnnnnnnnnnnnnnnnnnnnnnnnnnnnnnnnnnnnnnnnnnnnnnnnnnnnnnnnnnnnnnnnnnnnnnnnnnnnnnnnnnnnnnnnnnnnnnnnnnnnnnnnnnnnnnnnnnnnnnnnnnnnnnnnnnnnnnnnnnnnnnnnnnnnnnnnnnnnnnnnnnnnnnnnnnnnnnnnnnnnnnnnnnnnnnnnnnnnnnnnnnnnnnnnnnnnnnnnnnnnnnnnnnnnnnnnnnnnnnnnnnnnnnnnnnnnnnnnnnnnnnnnnnnnnnnnnnnnnnnnnnnnnnnnnnnnnnnnnnnnnnnnnnnnnnnnnnnnnnnnnnnnnnnnnnnnnnnnnnnnnnnnnnnnnnnnnnnnnnnnnnnnnnnnnnnnnnnnnnnnnnnnnnnnnnnnnnnnnnnnnnnnnnnnnnnnnnnnnnnnnnnnnnnnnnnnnnnnnnnnnnnnnnnnnnnnnnnnnnnnnnnnnnnnnnnnnnnnnnnnnnnnnnnnnnnnnnnnnnnnnnnnnnnnnnnnnnnnnnnnnnnnnnnnnnnnnnnnnnnnnnnnnnnnnnnnnnnnnnnnnnnnnnnnnnnnnnnnnnnnnnnnnnnnnnnnnnnnnnnnnnnnnnnnnnnnnnnnnnnnnnnnnnnnnnnnnnnnnnnnnnnnnnnnnnnnnnnnnnnnnnnnnnnnnnnnnnnnnnnnnnnnnnnnnnnnnnnnnnnnnnnnnnnnnnnnnnnnnnnnnnnnnnnnnnnnnnnnnnnnnnnnnnnnnnnnnnnnnnnnnnnnnnnnnnnnnnnnnnnnnnnnnnnnnnnnnnnnnnnnnnnnnnnnnnnnnnnnnnnnnnnnnnnnnnnnnnnnnnnnnnnnnnnnnnnnnnnnnnnnnnnnnnnnnnnnnnnnnnnnnnnnnnnnnnnnnnnnnnnnnnnnnnnnnnnnnnnnnnnnnnnnnnnnnnnnnnnnnnnnnnnnnnnnnnnnnnnnnnnnnnnnnnnnnnnnnnnnnnnnnnnnnnnnnnnnnnnnnnnnnnnnnnnnnnnnnnnnnnnnnnnnnnnnnnnnnnnnnnnnnnnnnnnnnnnnnnnnnnnnnnnnnnnnnnnnnnnnnnnnnnnnnnnnnnnnnnnnnnnnnnnnnnnnnnnnnnnnnnnnnnnnnnnnnnnnnnnnnnnnnnnnnnnnnnnnnnnnnnnnnnnnnnnnnnnnnnnnnnnnnnnnnnnnnnnnnnnnnnnnnnnnnnnnnnnnnnnnnnnnnnnnnnnnnnnnnnnnnnnnnnnnnnnnnnnnnnnnnnnnnnnnnnnnnnnnnnnnnnnnnnnnnnnnnnnnnnnnnnnnnnnnnnnnnnnnnnnnnnnnnnnnnnnnnnnnnnnnnnnnnnnnnnnnnnnnnnnnnnnnnnnnnnnnnnnnnnnnnnnnnnnnnnnnnnnnnnnnnnnnnnnnnnnnnnnnnnnnnnnnnnnnnnnnnnnnnnnnnnnnnnnnnnnnnnnnnnnnnnnnnnnnnnnnnnnnnnnnnnnnnnnnnnnnnnnnnnnnnnnnnnnnnnnnnnnnnnnnnnnnnnnnnnnnnnnnnnnnnnnnnnnnnnnnnnnnnnnnnnnnnnnnnnnnnnnnnnnnnnnnnnnnnnnnnnnnnnnnnnnnnnnnnnnnnnnnnnnnnnnnnnnnnnnnnnnnnnnnnnnnnnnnnnnnnnnnnnnnnnnnnnnnnnnnnnnnnnnnnnnnnnnnnnnnnnnnnnnnnnnnnnnnnnnnnnnnnnnnnnnnnnnnnnnnnnnnnnnnnnnnnnnnnnnnnnnnnnnnnnnnnnnnnnnnnnnnnnnnnnnnnnnnnnnnnnnnnnnnnnnnnnnnnnnnnnnnnnnnnnnnnnnnnnnnnnnnnnnnnnnnnnnnnnnnnnnnnnnnnnnnnnnnnnnnnnnnnnnnnnnnnnnnnnnnnnnnnnnnnnnnnnnnnnnnnnnnnnnnnnnnnnnnnnnnnnnnnnnnnnnnnnnnnnnnnnnnnnnnnnnnnnnnnnnnnnnnnnnnnnnnnnnnnnnnnnnnnnnnnnnnnnnnnnnnnnnnnnnnnnnnnnnnnnnnnnnnnnnnnnnnnnnnnnnnnnnnnnnnnnnnnnnnnnnnnnnnnnnnnnnnnnnnnnnnnnnnnnnnnnnnnnnnnnnnnnnnnnnnnnnnnnnnnnnnnnnnnnnnnnnnnnnnnnnnnnnnnnnnnnnnnnnnnnnnnnnnnnnnnnnnnnnnnnnnnnnnnnnnnnnnnnnnnnnnnnnnnnnnnnnnnnnnnnnnnnnnnnnnnnnnnnnnnnnnnnnnnnnnnnnnnnnnnnnnnnnnnnnnnnnnnnnnnnnnnnnnnnnnnnnnnnnnnnnnnnnnnnnnnnnnnnnnnnnnnnnnnnnnnnnnnnnnnnnnnnnnnnnnnnnnnnnnnnnnnnnnnnnnnnnnnnnnnnnnnnnnnnnnnnnnnnnnnnnnnnnnnnnnnnnnnnnnnnnnnnnnnnnnnnnnnnnnnnnnnnnnnnnnnnnnnnnnnnnnnnnnnnnnnnnnnnnnnnnnnnnnnnnnnnnnnnnnnnnnnnnnnnnnnnnnnnnnnnnnnnnnnnnnnnnnnnnnnnnnnnnnnnnnnnnnnnnnnnnnnnnnnnnnnnnnnnnnnnnnnnnnnnnnnnnnnnnnnnnnnnnnnnnnnnnnnnnnnnnnnnnnnnnnnnnnnnnnnnnnnnnnnnnnnnnnnnnnnnnnnnnnnnnnnnnnnnnnnnnnnnnnnnnnnnnnnnnnnnnnnnnnnnnnnnnnnnnnnnnnnnnnnnnnnnnnnnnnnnnnnnnnnnnnnnnnnnnnnnnnnnnnnnnnnnnnnnnnnnnnnnnnnnnnnnnnnnnnnnnnnnnnnnnnnnnnnnnnnnnnnnnnnnnnnnnnnnnnnnnnnnnnnnnnnnnnnnnnnnnnnnnnnnnnnnnnnnnnnnnnnnnnnnnnnnnnnnnnnnnnnnnnnnnnnnnnnnnnnnnnnnnnnnnnnnnnnnnnnnnnnnnnnnnnnnnnnnnnnnnnnnnnnnnnnnnnnnnnnnnnnnnnnnnnnnnnnnnnnnnnnnnnnnnnnnnnnnnnnnnnnnnnnnnnnnnnnnnnnnnnnnnnnnnnnnnnnnnnnnnnnnnnnnnnnnnnnnnnnnnnnnnnnnnnnnnnnnnnnnnnnnnnnnnnnnnnnnnnnnnnnnnnnnnnnnnnnnnnnnnnnnnnnnnnnnnnnnnnnnnnnnnnnnnnnnnnnnnnnnnnnnnnnnnnnnnnnnnnnnnnnnnnnnnnnnnnnnnnnnnnnnnnnnnnnnnnnnnnnnnnnnnnnnnnnnnnnnnnnnnnnnnnnnnnnnnnnnnnnnnnnnnnnnnnnnnnnnnnnnnnnnnnnnnnnnnnnnnnnnnnnnnnnnnnnnnnnnnnnnnnnnnnnnnnnnnnnnnnnnnnnnnnnnnnnnnnnnnnnnnnnnnnnnnnnnnnnnnnnnnnnnnnnnnnnnnnnnnnnnnnnnnnnnnnnnnnnnnnnnnnnnnnnnnnnnnnnnnnnnnnnnnnnnnnnnnnnnnnnnnnnnnnnnnnnnnnnnnnnnnnnnnnnnnnnnnnnnnnnnnntatggggctgctacggctaccgctattctccgtaagtggcctgcccaacctaatggccgggataaacggcataccacccctctatgtgatgattttgggcacttcgctcttgaataccctttccaggaactggatgcaactcgggcagcttggcgatcccgcgtgggttcaaccagacatccgtccagcttcaagtgaggccgtacccctgctgaccggcttgacactgctatcgcggcgggtttggctgcataagccatcggtgccagcgggcaagtgtggcggttgcggggcagagaaactggcgcttatcagaacctgcgagtttcagaccgccggcaagcaggaaaatgagttgtggagtgatccccatgttgtttatttggacaagaatccacgaaagtccattagagcacctgatttgaccgcaacgggcaagttcaaaatggaccgaccgtggcttgacctgcttgcccgcatcgtggaaatgggaaagtttgggcttcgtgaaggcccaatatcgtttctcgtcgtcggctttgctacggaccaggcaaagaacattgacgtatgggaacgaaccattgggagactgtcaagacgatcaatacaggaaacggcggcatcgttgatacgtcaatggcagaaggaaggagccaatcttgcccgcagaatccgtcctccaaaggaaaagggatcttcccgcaagtacatcgaaattccaccggtcctggatgctattcgcccacacgtcgaacacaaagtctctgagatggcgagcaaccttatcgttgacgattcccaaacgtgggaacacgccgcccatgaatatcgctcaatgatggccgttatcgcaaaatcgctttcccccggtttcacaaccgatgctgtgcgacagcgaaaactaattgccagtgtggcacccgccatgcggcctggggtcgaacaaacgaagaaaacccgccgcaccaagaaaggagacgaaaagtgactcctacggaacagtacatagatgttctgactcggttgaaaaagggtgacttgggtctgctacgcagccacgctgggcaaggacttgatgagtcggtcgacgggtttgacctgttcgcgggcctgtggtggcccttgcgcgcgagttacgagagggctcctcgccgcgaagttgcctggctgatcgccaaactctacgccttttgccccatcccgcattttcaaggcgattgtcttgcgcatcaattgcgccactgtcagccgaacgaagagcaggcaaggcaaagataccagaaaagatttgatcggatgctaatcctgccgctcagccggatcgagcccgctctgcactgggcgcttgattgggtggctaaaaacagctcgaaactcgattgggtgacactcacgaatgatctctccatttgggaacgcgaatctacgcgactcaagtgggcggagcaattcatgaaaacctatgaaaggaaggactcatgttgatcgaaattcacacgattcagaaccacagcccagcaaatctgaaccgggacgacctgggtgcgcctaaaacctgttacttcggcggggtaatgcgctcgcgtatctccagtcaatgcctcaaacgcagcatccgcacgagtgatgagttcaagaaactctgcggtggcattcgcacgcgacagttagcgaagcttatcgctgagagagtcgggggtaaggcggatgccaagaaacgcactgcaaagattctcaaagagtgcggcatcaaaccaagagacgaggacaagagcgacatgctggtctacacgactcgcgaagcgatcaacgaaatggccactcttttgcagagcggcggaaagacagatgaagagcttgcgacggaatttgggaaactgatcgctgaacggactgccgtaccggacatggccctgagtggaagaatgctggaaaccggcgtcctgcaaaacacgactgtggaagcggcgttgcaggtggctcatgcaatttccacccatgaggcgcgcccggaagtggattactacgttgccgcagacgacattcctggcgacgatgcgggagcaggctatgtagacgaagccatgttttcttctgcctgtttctacaagtacttctcgatccactgggagacactcgtcaagaatctccaaggcttccagggcaacgccgaacatttggccgcccacacggtgggcgcgttcattcggggcgtggcattggtcaatcccacgggaaaacaaaacagcttcgccgcacacaatcctcctgatggaatgctggttgaaattaaggaagcgcccatcagctatgccaacgctttcgctaaaccggcagcccaaggccagcgtgacattatctctcaaagcatagcgcaattgggacaatacatccacgacatggacactggatacggcaggccgcggaaacggttatggttctcgcctaatctccgttaccgcttgactgtagtcgaaaatgagcaggagatcctcctcagcgagaataacatcaaatcgctggaagaattgatccccgcagtgattactgccatcgaccatgactggaactcggttcagaggatcgtcattagccaggagttggcctcatgagcgccgatacactcattctccgcctggagggtcccttgcaggcatggggcgcacatgagtcgaagttcgtcgtccgccgaacagctcaagcgccgaccaaatcaggagtgatcggaatgctctgcgcggccttgggtctgtcgcgttccaaggcgtcggagctttggcttccgcggctcggcgccctgcgcatgggcgttcgcgtcgactcgccgggtgtgcgttggtgggactatcacacggtcggagcagggatggaaatgcgcattgccgcaggccaaggtaagagcaagcccggcgcgatgctcacacgacgagagtacctgtgtgacgcttcctttttggttgcactgcaaggcgaaccgggccttatcgacgagttggatgcagcagtacgaaagcccaaatatacgctatacctcggaagaaaagcctgcccgccctcccgtcctcttctggagcatccggctggctcttaccctgatttggattcggcgctgacatccattccctggcgtccgcggttcaagagagaggcggcgccgcaaatcgtagactgcctgctggactgggagagtacgcctgcacagcccgaggcccccaatgatgccctcgtctggtatgacgttcctctcacgttcgaaccgccgggacacaggccccggttcgttatccgcaaggcactacgtgtaggcacagcaggtgaggtcagtgtagctgaaacagcagctcaggataggacaccacctcccccgagacagcgagcgaactatcgaaacaacgagtatcgtaaggcgcgcagcgcccgactcactgccgaccacgagctgtgcgttttttgcaaggctccagctacaacggttcaacatgtcacgtaccgaagggccggtggcaatgaagagcgagaagaccttcgttcgctctgcagattgtgccacgatgcggtcaccatgatcgagtacggcctaggcatgggcttggaccggatcaaccccgaagattcatgctggcacgagcaaattgtcagaaagcgagctgaaatcatcgagtttcgctccctcgaaactcggcgtcgacgcctgaaaccggaggaggtggagtgatgtacgtctccacgttgctcataaatgtgggtatcaatcccgaccgccctcgtcctgggcggctgtggctgagaaatcgatacagggttcaccagcgtctgtgcatggcctttccatctgagtccaggatatctgaggacgcggactttcttaaacccttcaaaccggaagattttggctccaatcaggttcacgttactcgaggtcccgacgccgggttcctgtatcgcatagaccctctggctggtggtggggtcgtgattctcgtacagtcggcagcgaagcccaactggggctacgcgttctgcaacgccgatcatcttctggcggctcctccagaggtgaactttcccgctttcagtttctcactggaacagcatcttcgattccgtctcgtggcaaatccgacacgcaagatcgacacgaagagtggaccagatgggtgtcgacgcaatggaaagcgcgttcctgtgcggacaaacgagctttacaattggctcgctcgtcgcgccgacccggcgggattctccatcgacagggattccaccgccgtgcaggcgggctacatctatgtgaacaagacatcagacggccctggccaacgcctgcgctctgtccgttacgacggaatactcaagatcactgaccctgcccattttcaagagagcctcatctgcggtatcggtccggctaaagcgttcggtttcggtcttctttctgtggcgcctgttaagccctgactccgggaggcggcggcatgagaatacatgatctgcatattctgcccaagttccgtgattcctggagttacctgtatgtggacaactgcaggattgagcagcaagacaaagccatcgtggtgcttgacgcaaacgggaagatccctgtcccatgtgcagctgtgtgccttctgatgctggggccgggaacaagtatcactcatgcagcgatttcagctttagccgataatggatgtctggtgtgctggggtggagaagagggtgtgcgcttctatgcctacggccagggaaagacgaggaacgcggacaacttgctacatcaggctcgtttatggtcagacccggacacacgtatcgaggttgtaatcaaactctataaaatgcgctttgacgagcctctgccggactcatgggacctgaggcagattcgaggcagggaagggatacgtgtccgagaagcttatgcctgcgcttccagagacacgggagtgccgtggacagggcgatcctatgatcggaagaactgggctgcctcggaccctgttaatcgtgccctttccgcggcaaacagttgcctttacggaatctgccaagcaggtattttggctcttgggctatcccctgcgataggattcattcatacgggaaaaatgttgtcctttgtttacgacatagcggatctttacaagaccgacatttccatacccatagcgttctctatcgtcgccgagggcttggaacagcttgagacccgggcacgaagagcgccgagggacgcgttcaaaaagaacatgcttctaaagaaggtgattcaggatattcagttcgctctgcgaataaagagcgccggccaaccggggatatcatcggcccttgattctgatccggctcttccagcctctctctgggaccccgtggagggagccgtggaaagcggcaagaattttgcggaagaaggagaagttggggaagaagatggtggtgctgatacttgaaaaggtgcccacagggctgcgaggcgagcttacccgttggatgttggagccgaagaccgggatcttcctgggcagtgtttcggggatggtgcgagaccgactctggcagaaagcgtgtgaggagtcacggggtggaggctgtctcatgattcatgacagcaataccgaacaaggatttgcaatgcgctcctccggggagtcgaaacgcctgtttgaagacttcgagggtctttttctggtacgaattcccaagtagagccgttttgtccagtgttgtccccacgcacgtgggggtgaaccgggcgcgaaacgccccgtagttgatggttgatagttgtccccacgcacgtgggggtgaaccgaagatcctagacaatattagacgctaccttaagttgtccccacgcacgtgggggtgaaccatgtgtttcgtcttgtaggtggttgcctgggtcgttgtccccacgcacgtgggggtgaaccggggatgtgaaagctttgcgaactttacaagacgttgtccccacgcacgtgggggtgaaccgacggcctctccgggaggcggggctgccaacgcgttgtccccacgcacgtgggggtgaaccggtggaattgccgcacccgctggaacgggattcgttgtccccacgcacgtgggggtgaaccgaccgttcctccgatagttggagtgtcggatccgttgtccccacgcacgtgggggtgaaccggcgcgccagggaatcacggtcttaaatgtagggttgtccccacgcacgtgggggtgaaccggtcatgacaggacttactcagacgttcaaccagttgtccccacgcacgtgggggtgaaccgacgccaaaggcagtcgggaagtctacggcgttgttgtccccacgcacgtgggggtgaaccgccccaccaactacacgacagccgcgaacaggggttgtccccacgcacgtgggggtgaaccgtccgaagcgggccatacggacatttgggatgagttgtccccacgcacgtgggggtgaaccgttccagacgcgaccctatagttcacttggacagttgtccccacgcacgtgggggtgaaccgtaatagccaaggaccttaacacgctatacaccgttgtccccacgcacgtgggggtgaaccggttattgaggaagcaaccgaggcggacggggagttgtccccacgcacgtgggggtgaaccggttattgaggaagcaaccgaggcggacggggagttgtccccacgcacgtgggggtgaaccggcggcaggtagcccgattcagttatatcctctgttgtccccacgcacgtgggggtgaaccgaaagccgcccttgttttcaagcaaccggatgagttgtccccacgcacgtgggggtgaaccgctgccgctctcgacaatgccgttcctctgtaagttgtccccacgcacgtgggggtgaaccggcctccacagtatcacggaaaagcttgacaccgttgtccccacgcacgtgggggtgaaccgtgccaaatctgggctacctctccggcaaggttgttgtccccacgcacgtgggggtgaaccgattatgggtggggcaatccgggagcttcagccgttgtccccacgcacgtgggggtgaaccgatcatcctcaaaatggtggccacaaaccccgagttgtccccacgcacgtgggggtgaaccgatttcgtaggcccgcagaagtaccgccagatcgttgtccccacgcacgtgggggtgaaccgtgaattgaactcaccggtcgatgatgtctattcgtactcaaagaactgaaatcggggaaaccttcttgaagaagtgtttccccgaactccatcccaagcacttccagcattttgtctgaatcccgattttttcttggaaaaacagggattcagacaaatggtaaaagtttcttggaaggatttggagagccttttcttgcgaaaaaggttccccaaattttgttggtttgaaagcgcagtggcatcagtcctggcattcttctctccagaggcaccccatctcccagcagtcatgtattcccctgaagcaaggagaattaccctccatctcctggatggctcggatcaaattttcttttctgtaccgggtgatgttcttcaaacccattcttctggccttttgacgaagttgctgcaaagtcatgcttaaactcctctctccaagtccgctaaaagagcaataattgctctcgaagcttcttagtccaaagctctcctgaaaatcaagtgtaaattctctcagtcacgttagattggtgttagaaaaaacctgaagctgcagcttgaatatgataaaatagttaaaggtaatgacaccatgagtcgatcgtattcaattgatgcctcatcagaggtcacaagactgcaccctctggcgttgaccgcgttcatcgtggcccttgtgggcattcccgtcgtcgggcttgtgaccggccccgtggcgatgatattggccggcatggccatcggacagctcagcggcaactcaatgctgcgcgggaaagggcttgccgtagcggccttggccattggactgggagatgtggttctgtggacagccataatcgggttagtaattccgaatatcaatttaaccgcgggccgcgcaatagagcaatccattg

SEQ ID NO: 1091 - DNA, 104986 bp, Artificial Sequence
  Synthetic Oligonucleotide
  misc_feature (1)..(96872): n is a, c, g, or t
nnnnnnnnnnnnnnnnnnnnnnnnnnnnnnnnnnnnnnnnnnnnnnnnnnnnnnnnnnnnnnnnnnnnnnnnnnnnnnnnnnnnnnnnnnnnnnnnnnnnnnnnnnnnnnnnnnnnnnnnnnnnnnnnnnnnnnnnnnnnnnnnnnnnnnnnnnnnnnnnnnnnnnnnnnnnnnnnnnnnnnnnnnnnnnnnnnnnnnnnnnnnnnnnnnnnnnnnnnnnnnnnnnnnnnnnnnnnnnnnnnnnnnnnnnnnnnnnnnnnnnnnnnnnnnnnnnnnnnnnnnnnnnnnnnnnnnnnnnnnnnnnnnnnnnnnnnnnnnnnnnnnnnnnnnnnnnnnnnnnnnnnnnnnnnnnnnnnnnnnnnnnnnnnnnnnnnnnnnnnnnnnnnnnnnnnnnnnnnnnnnnnnnnnnnnnnnnnnnnnnnnnnnnnnnnnnnnnnnnnnnnnnnnnnnnnnnnnnnnnnnnnnnnnnnnnnnnnnnnnnnnnnnnnnnnnnnnnnnnnnnnnnnnnnnnnnnnnnnnnnnnnnnnnnnnnnnnnnnnnnnnnnnnnnnnnnnnnnnnnnnnnnnnnnnnnnnnnnnnnnnnnnnnnnnnnnnnnnnnnnnnnnnnnnnnnnnnnnnnnnnnnnnnnnnnnnnnnnnnnnnnnnnnnnnnnnnnnnnnnnnnnnnnnnnnnnnnnnnnnnnnnnnnnnnnnnnnnnnnnnnnnnnnnnnnnnnnnnnnnnnnnnnnnnnnnnnnnnnnnnnnnnnnnnnnnnnnnnnnnnnnnnnnnnnnnnnnnnnnnnnnnnnnnnnnnnnnnnnnnnnnnnnnnnnnnnnnnnnnnnnnnnnnnnnnnnnnnnnnnnnnnnnnnnnnnnnnnnnnnnnnnnnnnnnnnnnnnnnnnnnnnnnnnnnnnnnnnnnnnnnnnnnnnnnnnnnnnnnnnnnnnnnnnnnnnnnnnnnnnnnnnnnnnnnnnnnnnnnnnnnnnnnnnnnnnnnnnnnnnnnnnnnnnnnnnnnnnnnnnnnnnnnnnnnnnnnnnnnnnnnnnnnnnnnnnnnnnnnnnnnnnnnnnnnnnnnnnnnnnnnnnnnnnnnnnnnnnnnnnnnnnnnnnnnnnnnnnnnnnnnnnnnnnnnnnnnnnnnnnnnnnnnnnnnnnnnnnnnnnnnnnnnnnnnnnnnnnnnnnnnnnnnnnnnnnnnnnnnnnnnnnnnnnnnnnnnnnnnnnnnnnnnnnnnnnnnnnnnnnnnnnnnnnnnnnnnnnnnnnnnnnnnnnnnnnnnnnnnnnnnnnnnnnnnnnnnnnnnnnnnnnnnnnnnnnnnnnnnnnnnnnnnnnnnnnnnnnnnnnnnnnnnnnnnnnnnnnnnnnnnnnnnnnnnnnnnnnnnnnnnnnnnnnnnnnnnnnnnnnnnnnnnnnnnnnnnnnnnnnnnnnnnnnnnnnnnnnnnnnnnnnnnnnnnnnnnnnnnnnnnnnnnnnnnnnnnnnnnnnnnnnnnnnnnnnnnnnnnnnnnnnnnnnnnnnnnnnnnnnnnnnnnnnnnnnnnnnnnnnnnnnnnnnnnnnnnnnnnnnnnnnnnnnnnnnnnnnnnnnnnnnnnnnnnnnnnnnnnnnnnnnnnnnnnnnnnnnnnnnnnnnnnnnnnnnnnnnnnnnnnnnnnnnnnnnnnnnnnnnnnnnnnnnnnnnnnnnnnnnnnnnnnnnnnnnnnnnnnnnnnnnnnnnnnnnnnnnnnnnnnnnnnnnnnnnnnnnnnnnnnnnnnnnnnnnnnnnnnnnnnnnnnnnnnnnnnnnnnnnnnnnnnnnnnnnnnnnnnnnnnnnnnnnnnnnnnnnnnnnnnnnnnnnnnnnnnnnnnnnnnnnnnnnnnnnnnnnnnnnnnnnnnnnnnnnnnnnnnnnnnnnnnnnnnnnnnnnnnnnnnnnnnnnnnnnnnnnnnnnnnnnnnnnnnnnnnnnnnnnnnnnnnnnnnnnnnnnnnnnnnnnnnnnnnnnnnnnnnnnnnnnnnnnnnnnnnnnnnnnnnnnnnnnnnnnnnnnnnnnnnnnnnnnnnnnnnnnnnnnnnnnnnnnnnnnnnnnnnnnnnnnnnnnnnnnnnnnnnnnnnnnnnnnnnnnnnnnnnnnnnnnnnnnnnnnnnnnnnnnnnnnnnnnnnnnnnnnnnnnnnnnnnnnnnnnnnnnnnnnnnnnnnnnnnnnnnnnnnnnnnnnnnnnnnnnnnnnnnnnnnnnnnnnnnnnnnnnnnnnnnnnnnnnnnnnnnnnnnnnnnnnnnnnnnnnnnnnnnnnnnnnnnnnnnnnnnnnnnnnnnnnnnnnnnnnnnnnnnnnnnnnnnnnnnnnnnnnnnnnnnnnnnnnnnnnnnnnnnnnnnnnnnnnnnnnnnnnnnnnnnnnnnnnnnnnnnnnnnnnnnnnnnnnnnnnnnnnnnnnnnnnnnnnnnnnnnnnnnnnnnnnnnnnnnnnnnnnnnnnnnnnnnnnnnnnnnnnnnnnnnnnnnnnnnnnnnnnnnnnnnnnnnnnnnnnnnnnnnnnnnnnnnnnnnnnnnnnnnnnnnnnnnnnnnnnnnnnnnnnnnnnnnnnnnnnnnnnnnnnnnnnnnnnnnnnnnnnnnnnnnnnnnnnnnnnnnnnnnnnnnnnnnnnnnnnnnnnnnnnnnnnnnnnnnnnnnnnnnnnnnnnnnnnnnnnnnnnnnnnnnnnnnnnnnnnnnnnnnnnnnnnnnnnnnnnnnnnnnnnnnnnnnnnnnnnnnnnnnnnnnnnnnnnnnnnnnnnnnnnnnnnnnnnnnnnnnnnnnnnnnnnnnnnnnnnnnnnnnnnnnnnnnnnnnnnnnnnnnnnnnnnnnnnnnnnnnnnnnnnnnnnnnnnnnnnnnnnnnnnnnnnnnnnnnnnnnnnnnnnnnnnnnnnnnnnnnnnnnnnnnnnnnnnnnnnnnnnnnnnnnnnnnnnnnnnnnnnnnnnnnnnnnnnnnnnnnnnnnnnnnnnnnnnnnnnnnnnnnnnnnnnnnnnnnnnnnnnnnnnnnnnnnnnnnnnnnnnnnnnnnnnnnnnnnnnnnnnnnnnnnnnnnnnnnnnnnnnnnnnnnnnnnnnnnnnnnnnnnnnnnnnnnnnnnnnnnnnnnnnnnnnnnnnnnnnnnnnnnnnnnnnnnnnnnnnnnnnnnnnnnnnnnnnnnnnnnnnnnnnnnnnnnnnnnnnnnnnnnnnnnnnnnnnnnnnnnnnnnnnnnnnnnnnnnnnnnnnnnnnnnnnnnnnnnnnnnnnnnnnnnnnnnnnnnnnnnnnnnnnnnnnnnnnnnnnnnnnnnnnnnnnnnnnnnnnnnnnnnnnnnnnnnnnnnnnnnnnnnnnnnnnnnnnnnnnnnnnnnnnnnnnnnnnnnnnnnnnnnnnnnnnnnnnnnnnnnnnnnnnnnnnnnnnnnnnnnnnnnnnnnnnnnnnnnnnnnnnnnnnnnnnnnnnnnnnnnnnnnnnnnnnnnnnnnnnnnnnnnnnnnnnnnnnnnnnnnnnnnnnnnnnnnnnnnnnnnnnnnnnnnnnnnnnnnnnnnnnnnnnnnnnnnnnnnnnnnnnnnnnnnnnnnnnnnnnnnnnnnnnnnnnnnnnnnnnnnnnnnnnnnnnnnnnnnnnnnnnnnnnnnnnnnnnnnnnnnnnnnnnnnnnnnnnnnnnnnnnnnnnnnnnnnnnnnnnnnnnnnnnnnnnnnnnnnnnnnnnnnnnnnnnnnnnnnnnnnnnnnnnnnnnnnnnnnnnnnnnnnnnnnnnnnnnnnnnnnnnnnnnnnnnnnnnnnnnnnnnnnnnnnnnnnnnnnnnnnnnnnnnnnnnnnnnnnnnnnnnnnnnnnnnnnnnnnnnnnnnnnnnnnnnnnnnnnnnnnnnnnnnnnnnnnnnnnnnnnnnnnnnnnnnnnnnnnnnnnnnnnnnnnnnnnnnnnnnnnnnnnnnnnnnnnnnnnnnnnnnnnnnnnnnnnnnnnnnnnnnnnnnnnnnnnnnnnnnnnnnnnnnnnnnnnnnnnnnnnnnnnnnnnnnnnnnnnnnnnnnnnnnnnnnnnnnnnnnnnnnnnnnnnnnnnnnnnnnnnnnnnnnnnnnnnnnnnnnnnnnnnnnnnnnnnnnnnnnnnnnnnnnnnnnnnnnnnnnnnnnnnnnnnnnnnnnnnnnnnnnnnnnnnnnnnnnnnnnnnnnnnnnnnnnnnnnnnnnnnnnnnnnnnnnnnnnnnnnnnnnnnnnnnnnnnnnnnnnnnnnnnnnnnnnnnnnnnnnnnnnnnnnnnnnnnnnnnnnnnnnnnnnnnnnnnnnnnnnnnnnnnnnnnnnnnnnnnnnnnnnnnnnnnnnnnnnnnnnnnnnnnnnnnnnnnnnnnnnnnnnnnnnnnnnnnnnnnnnnnnnnnnnnnnnnnnnnnnnnnnnnnnnnnnnnnnnnnnnnnnnnnnnnnnnnnnnnnnnnnnnnnnnnnnnnnnnnnnnnnnnnnnnnnnnnnnnnnnnnnnnnnnnnnnnnnnnnnnnnnnnnnnnnnnnnnnnnnnnnnnnnnnnnnnnnnnnnnnnnnnnnnnnnnnnnnnnnnnnnnnnnnnnnnnnnnnnnnnnnnnnnnnnnnnnnnnnnnnnnnnnnnnnnnnnnnnnnnnnnnnnnnnnnnnnnnnnnnnnnnnnnnnnnnnnnnnnnnnnnnnnnnnnnnnnnnnnnnnnnnnnnnnnnnnnnnnnnnnnnnnnnnnnnnnnnnnnnnnnnnnnnnnnnnnnnnnnnnnnnnnnnnnnnnnnnnnnnnnnnnnnnnnnnnnnnnnnnnnnnnnnnnnnnnnnnnnnnnnnnnnnnnnnnnnnnnnnnnnnnnnnnnnnnnnnnnnnnnnnnnnnnnnnnnnnnnnnnnnnnnnnnnnnnnnnnnnnnnnnnnnnnnnnnnnnnnnnnnnnnnnnnnnnnnnnnnnnnnnnnnnnnnnnnnnnnnnnnnnnnnnnnnnnnnnnnnnnnnnnnnnnnnnnnnnnnnnnnnnnnnnnnnnnnnnnnnnnnnnnnnnnnnnnnnnnnnnnnnnnnnnnnnnnnnnnnnnnnnnnnnnnnnnnnnnnnnnnnnnnnnnnnnnnnnnnnnnnnnnnnnnnnnnnnnnnnnnnnnnnnnnnnnnnnnnnnnnnnnnnnnnnnnnnnnnnnnnnnnnnnnnnnnnnnnnnnnnnnnnnnnnnnnnnnnnnnnnnnnnnnnnnnnnnnnnnnnnnnnnnnnnnnnnnnnnnnnnnnnnnnnnnnnnnnnnnnnnnnnnnnnnnnnnnnnnnnnnnnnnnnnnnnnnnnnnnnnnnnnnnnnnnnnnnnnnnnnnnnnnnnnnnnnnnnnnnnnnnnnnnnnnnnnnnnnnnnnnnnnnnnnnnnnnnnnnnnnnnnnnnnnnnnnnnnnnnnnnnnnnnnnnnnnnnnnnnnnnnnnnnnnnnnnnnnnnnnnnnnnnnnnnnnnnnnnnnnnnnnnnnnnnnnnnnnnnnnnnnnnnnnnnnnnnnnnnnnnnnnnnnnnnnnnnnnnnnnnnnnnnnnnnnnnnnnnnnnnnnnnnnnnnnnnnnnnnnnnnnnnnnnnnnnnnnnnnnnnnnnnnnnnnnnnnnnnnnnnnnnnnnnnnnnnnnnnnnnnnnnnnnnnnnnnnnnnnnnnnnnnnnnnnnnnnnnnnnnnnnnnnnnnnnnnnnnnnnnnnnnnnnnnnnnnnnnnnnnnnnnnnnnnnnnnnnnnnnnnnnnnnnnnnnnnnnnnnnnnnnnnnnnnnnnnnnnnnnnnnnnnnnnnnnnnnnnnnnnnnnnnnnnnnnnnnnnnnnnnnnnnnnnnnnnnnnnnnnnnnnnnnnnnnnnnnnnnnnnnnnnnnnnnnnnnnnnnnnnnnnnnnnnnnnnnnnnnnnnnnnnnnnnnnnnnnnnnnnnnnnnnnnnnnnnnnnnnnnnnnnnnnnnnnnnnnnnnnnnnnnnnnnnnnnnnnnnnnnnnnnnnnnnnnnnnnnnnnnnnnnnnnnnnnnnnnnnnnnnnnnnnnnnnnnnnnnnnnnnnnnnnnnnnnnnnnnnnnnnnnnnnnnnnnnnnnnnnnnnnnnnnnnnnnnnnnnnnnnnnnnnnnnnnnnnnnnnnnnnnnnnnnnnnnnnnnnnnnnnnnnnnnnnnnnnnnnnnnnnnnnnnnnnnnnnnnnnnnnnnnnnnnnnnnnnnnnnnnnnnnnnnnnnnnnnnnnnnnnnnnnnnnnnnnnnnnnnnnnnnnnnnnnnnnnnnnnnnnnnnnnnnnnnnnnnnnnnnnnnnnnnnnnnnnnnnnnnnnnnnnnnnnnnnnnnnnnnnnnnnnnnnnnnnnnnnnnnnnnnnnnnnnnnnnnnnnnnnnnnnnnnnnnnnnnnnnnnnnnnnnnnnnnnnnnnnnnnnnnnnnnnnnnnnnnnnnnnnnnnnnnnnnnnnnnnnnnnnnnnnnnnnnnnnnnnnnnnnnnnnnnnnnnnnnnnnnnnnnnnnnnnnnnnnnnnnnnnnnnnnnnnnnnnnnnnnnnnnnnnnnnnnnnnnnnnnnnnnnnnnnnnnnnnnnnnnnnnnnnnnnnnnnnnnnnnnnnnnnnnnnnnnnnnnnnnnnnnnnnnnnnnnnnnnnnnnnnnnnnnnnnnnnnnnnnnnnnnnnnnnnnnnnnnnnnnnnnnnnnnnnnnnnnnnnnnnnnnnnnnnnnnnnnnnnnnnnnnnnnnnnnnnnnnnnnnnnnnnnnnnnnnnnnnnnnnnnnnnnnnnnnnnnnnnnnnnnnnnnnnnnnnnnnnnnnnnnnnnnnnnnnnnnnnnnnnnnnnnnnnnnnnnnnnnnnnnnnnnnnnnnnnnnnnnnnnnnnnnnnnnnnnnnnnnnnnnnnnnnnnnnnnnnnnnnnnnnnnnnnnnnnnnnnnnnnnnnnnnnnnnnnnnnnnnnnnnnnnnnnnnnnnnnnnnnnnnnnnnnnnnnnnnnnnnnnnnnnnnnnnnnnnnnnnnnnnnnnnnnnnnnnnnnnnnnnnnnnnnnnnnnnnnnnnnnnnnnnnnnnnnnnnnnnnnnnnnnnnnnnnnnnnnnnnnnnnnnnnnnnnnnnnnnnnnnnnnnnnnnnnnnnnnnnnnnnnnnnnnnnnnnnnnnnnnnnnnnnnnnnnnnnnnnnnnnnnnnnnnnnnnnnnnnnnnnnnnnnnnnnnnnnnnnnnnnnnnnnnnnnnnnnnnnnnnnnnnnnnnnnnnnnnnnnnnnnnnnnnnnnnnnnnnnnnnnnnnnnnnnnnnnnnnnnnnnnnnnnnnnnnnnnnnnnnnnnnnnnnnnnnnnnnnnnnnnnnnnnnnnnnnnnnnnnnnnnnnnnnnnnnnnnnnnnnnnnnnnnnnnnnnnnnnnnnnnnnnnnnnnnnnnnnnnnnnnnnnnnnnnnnnnnnnnnnnnnnnnnnnnnnnnnnnnnnnnnnnnnnnnnnnnnnnnnnnnnnnnnnnnnnnnnnnnnnnnnnnnnnnnnnnnnnnnnnnnnnnnnnnnnnnnnnnnnnnnnnnnnnnnnnnnnnnnnnnnnnnnnnnnnnnnnnnnnnnnnnnnnnnnnnnnnnnnnnnnnnnnnnnnnnnnnnnnnnnnnnnnnnnnnnnnnnnnnnnnnnnnnnnnnnnnnnnnnnnnnnnnnnnnnnnnnnnnnnnnnnnnnnnnnnnnnnnnnnnnnnnnnnnnnnnnnnnnnnnnnnnnnnnnnnnnnnnnnnnnnnnnnnnnnnnnnnnnnnnnnnnnnnnnnnnnnnnnnnnnnnnnnnnnnnnnnnnnnnnnnnnnnnnnnnnnnnnnnnnnnnnnnnnnnnnnnnnnnnnnnnnnnnnnnnnnnnnnnnnnnnnnnnnnnnnnnnnnnnnnnnnnnnnnnnnnnnnnnnnnnnnnnnnnnnnnnnnnnnnnnnnnnnnnnnnnnnnnnnnnnnnnnnnnnnnnnnnnnnnnnnnnnnnnnnnnnnnnnnnnnnnnnnnnnnnnnnnnnnnnnnnnnnnnnnnnnnnnnnnnnnnnnnnnnnnnnnnnnnnnnnnnnnnnnnnnnnnnnnnnnnnnnnnnnnnnnnnnnnnnnnnnnnnnnnnnnnnnnnnnnnnnnnnnnnnnnnnnnnnnnnnnnnnnnnnnnnnnnnnnnnnnnnnnnnnnnnnnnnnnnnnnnnnnnnnnnnnnnnnnnnnnnnnnnnnnnnnnnnnnnnnnnnnnnnnnnnnnnnnnnnnnnnnnnnnnnnnnnnnnnnnnnnnnnnnnnnnnnnnnnnnnnnnnnnnnnnnnnnnnnnnnnnnnnnnnnnnnnnnnnnnnnnnnnnnnnnnnnnnnnnnnnnnnnnnnnnnnnnnnnnnnnnnnnnnnnnnnnnnnnnnnnnnnnnnnnnnnnnnnnnnnnnnnnnnnnnnnnnnnnnnnnnnnnnnnnnnnnnnnnnnnnnnnnnnnnnnnnnnnnnnnnnnnnnnnnnnnnnnnnnnnnnnnnnnnnnnnnnnnnnnnnnnnnnnnnnnnnnnnnnnnnnnnnnnnnnnnnnnnnnnnnnnnnnnnnnnnnnnnnnnnnnnnnnnnnnnnnnnnnnnnnnnnnnnnnnnnnnnnnnnnnnnnnnnnnnnnnnnnnnnnnnnnnnnnnnnnnnnnnnnnnnnnnnnnnnnnnnnnnnnnnnnnnnnnnnnnnnnnnnnnnnnnnnnnnnnnnnnnnnnnnnnnnnnnnnnnnnnnnnnnnnnnnnnnnnnnnnnnnnnnnnnnnnnnnnnnnnnnnnnnnnnnnnnnnnnnnnnnnnnnnnnnnnnnnnnnnnnnnnnnnnnnnnnnnnnnnnnnnnnnnnnnnnnnnnnnnnnnnnnnnnnnnnnnnnnnnnnnnnnnnnnnnnnnnnnnnnnnnnnnnnnnnnnnnnnnnnnnnnnnnnnnnnnnnnnnnnnnnnnnnnnnnnnnnnnnnnnnnnnnnnnnnnnnnnnnnnnnnnnnnnnnnnnnnnnnnnnnnnnnnnnnnnnnnnnnnnnnnnnnnnnnnnnnnnnnnnnnnnnnnnnnnnnnnnnnnnnnnnnnnnnnnnnnnnnnnnnnnnnnnnnnnnnnnnnnnnnnnnnnnnnnnnnnnnnnnnnnnnnnnnnnnnnnnnnnnnnnnnnnnnnnnnnnnnnnnnnnnnnnnnnnnnnnnnnnnnnnnnnnnnnnnnnnnnnnnnnnnnnnnnnnnnnnnnnnnnnnnnnnnnnnnnnnnnnnnnnnnnnnnnnnnnnnnnnnnnnnnnnnnnnnnnnnnnnnnnnnnnnnnnnnnnnnnnnnnnnnnnnnnnnnnnnnnnnnnnnnnnnnnnnnnnnnnnnnnnnnnnnnnnnnnnnnnnnnnnnnnnnnnnnnnnnnnnnnnnnnnnnnnnnnnnnnnnnnnnnnnnnnnnnnnnnnnnnnnnnnnnnnnnnnnnnnnnnnnnnnnnnnnnnnnnnnnnnnnnnnnnnnnnnnnnnnnnnnnnnnnnnnnnnnnnnnnnnnnnnnnnnnnnnnnnnnnnnnnnnnnnnnnnnnnnnnnnnnnnnnnnnnnnnnnnnnnnnnnnnnnnnnnnnnnnnnnnnnnnnnnnnnnnnnnnnnnnnnnnnnnnnnnnnnnnnnnnnnnnnnnnnnnnnnnnnnnnnnnnnnnnnnnnnnnnnnnnnnnnnnnnnnnnnnnnnnnnnnnnnnnnnnnnnnnnnnnnnnnnnnnnnnnnnnnnnnnnnnnnnnnnnnnnnnnnnnnnnnnnnnnnnnnnnnnnnnnnnnnnnnnnnnnnnnnnnnnnnnnnnnnnnnnnnnnnnnnnnnnnnnnnnnnnnnnnnnnnnnnnnnnnnnnnnnnnnnnnnnnnnnnnnnnnnnnnnnnnnnnnnnnnnnnnnnnnnnnnnnnnnnnnnnnnnnnnnnnnnnnnnnnnnnnnnnnnnnnnnnnnnnnnnnnnnnnnnnnnnnnnnnnnnnnnnnnnnnnnnnnnnnnnnnnnnnnnnnnnnnnnnnnnnnnnnnnnnnnnnnnnnnnnnnnnnnnnnnnnnnnnnnnnnnnnnnnnnnnnnnnnnnnnnnnnnnnnnnnnnnnnnnnnnnnnnnnnnnnnnnnnnnnnnnnnnnnnnnnnnnnnnnnnnnnnnnnnnnnnnnnnnnnnnnnnnnnnnnnnnnnnnnnnnnnnnnnnnnnnnnnnnnnnnnnnnnnnnnnnnnnnnnnnnnnnnnnnnnnnnnnnnnnnnnnnnnnnnnnnnnnnnnnnnnnnnnnnnnnnnnnnnnnnnnnnnnnnnnnnnnnnnnnnnnnnnnnnnnnnnnnnnnnnnnnnnnnnnnnnnnnnnnnnnnnnnnnnnnnnnnnnnnnnnnnnnnnnnnnnnnnnnnnnnnnnnnnnnnnnnnnnnnnnnnnnnnnnnnnnnnnnnnnnnnnnnnnnnnnnnnnnnnnnnnnnnnnnnnnnnnnnnnnnnnnnnnnnnnnnnnnnnnnnnnnnnnnnnnnnnnnnnnnnnnnnnnnnnnnnnnnnnnnnnnnnnnnnnnnnnnnnnnnnnnnnnnnnnnnnnnnnnnnnnnnnnnnnnnnnnnnnnnnnnnnnnnnnnnnnnnnnnnnnnnnnnnnnnnnnnnnnnnnnnnnnnnnnnnnnnnnnnnnnnnnnnnnnnnnnnnnnnnnnnnnnnnnnnnnnnnnnnnnnnnnnnnnnnnnnnnnnnnnnnnnnnnnnnnnnnnnnnnnnnnnnnnnnnnnnnnnnnnnnnnnnnnnnnnnnnnnnnnnnnnnnnnnnnnnnnnnnnnnnnnnnnnnnnnnnnnnnnnnnnnnnnnnnnnnnnnnnnnnnnnnnnnnnnnnnnnnnnnnnnnnnnnnnnnnnnnnnnnnnnnnnnnnnnnnnnnnnnnnnnnnnnnnnnnnnnnnnnnnnnnnnnnnnnnnnnnnnnnnnnnnnnnnnnnnnnnnnnnnnnnnnnnnnnnnnnnnnnnnnnnnnnnnnnnnnnnnnnnnnnnnnnnnnnnnnnnnnnnnnnnnnnnnnnnnnnnnnnnnnnnnnnnnnnnnnnnnnnnnnnnnnnnnnnnnnnnnnnnnnnnnnnnnnnnnnnnnnnnnnnnnnnnnnnnnnnnnnnnnnnnnnnnnnnnnnnnnnnnnnnnnnnnnnnnnnnnnnnnnnnnnnnnnnnnnnnnnnnnnnnnnnnnnnnnnnnnnnnnnnnnnnnnnnnnnnnnnnnnnnnnnnnnnnnnnnnnnnnnnnnnnnnnnnnnnnnnnnnnnnnnnnnnnnnnnnnnnnnnnnnnnnnnnnnnnnnnnnnnnnnnnnnnnnnnnnnnnnnnnnnnnnnnnnnnnnnnnnnnnnnnnnnnnnnnnnnnnnnnnnnnnnnnnnnnnnnnnnnnnnnnnnnnnnnnnnnnnnnnnnnnnnnnnnnnnnnnnnnnnnnnnnnnnnnnnnnnnnnnnnnnnnnnnnnnnnnnnnnnnnnnnnnnnnnnnnnnnnnnnnnnnnnnnnnnnnnnnnnnnnnnnnnnnnnnnnnnnnnnnnnnnnnnnnnnnnnnnnnnnnnnnnnnnnnnnnnnnnnnnnnnnnnnnnnnnnnnnnnnnnnnnnnnnnnnnnnnnnnnnnnnnnnnnnnnnnnnnnnnnnnnnnnnnnnnnnnnnnnnnnnnnnnnnnnnnnnnnnnnnnnnnnnnnnnnnnnnnnnnnnnnnnnnnnnnnnnnnnnnnnnnnnnnnnnnnnnnnnnnnnnnnnnnnnnnnnnnnnnnnnnnnnnnnnnnnnnnnnnnnnnnnnnnnnnnnnnnnnnnnnnnnnnnnnnnnnnnnnnnnnnnnnnnnnnnnnnnnnnnnnnnnnnnnnnnnnnnnnnnnnnnnnnnnnnnnnnnnnnnnnnnnnnnnnnnnnnnnnnnnnnnnnnnnnnnnnnnnnnnnnnnnnnnnnnnnnnnnnnnnnnnnnnnnnnnnnnnnnnnnnnnnnnnnnnnnnnnnnnnnnnnnnnnnnnnnnnnnnnnnnnnnnnnnnnnnnnnnnnnnnnnnnnnnnnnnnnnnnnnnnnnnnnnnnnnnnnnnnnnnnnnnnnnnnnnnnnnnnnnnnnnnnnnnnnnnnnnnnnnnnnnnnnnnnnnnnnnnnnnnnnnnnnnnnnnnnnnnnnnnnnnnnnnnnnnnnnnnnnnnnnnnnnnnnnnnnnnnnnnnnnnnnnnnnnnnnnnnnnnnnnnnnnnnnnnnnnnnnnnnnnnnnnnnnnnnnnnnnnnnnnnnnnnnnnnnnnnnnnnnnnnnnnnnnnnnnnnnnnnnnnnnnnnnnnnnnnnnnnnnnnnnnnnnnnnnnnnnnnnnnnnnnnnnnnnnnnnnnnnnnnnnnnnnnnnnnnnnnnnnnnnnnnnnnnnnnnnnnnnnnnnnnnnnnnnnnnnnnnnnnnnnnnnnnnnnnnnnnnnnnnnnnnnnnnnnnnnnnnnnnnnnnnnnnnnnnnnnnnnnnnnnnnnnnnnnnnnnnnnnnnnnnnnnnnnnnnnnnnnnnnnnnnnnnnnnnnnnnnnnnnnnnnnnnnnnnnnnnnnnnnnnnnnnnnnnnnnnnnnnnnnnnnnnnnnnnnnnnnnnnnnnnnnnnnnnnnnnnnnnnnnnnnnnnnnnnnnnnnnnnnnnnnnnnnnnnnnnnnnnnnnnnnnnnnnnnnnnnnnnnnnnnnnnnnnnnnnnnnnnnnnnnnnnnnnnnnnnnnnnnnnnnnnnnnnnnnnnnnnnnnnnnnnnnnnnnnnnnnnnnnnnnnnnnnnnnnnnnnnnnnnnnnnnnnnnnnnnnnnnnnnnnnnnnnnnnnnnnnnnnnnnnnnnnnnnnnnnnnnnnnnnnnnnnnnnnnnnnnnnnnnnnnnnnnnnnnnnnnnnnnnnnnnnnnnnnnnnnnnnnnnnnnnnnnnnnnnnnnnnnnnnnnnnnnnnnnnnnnnnnnnnnnnnnnnnnnnnnnnnnnnnnnnnnnnnnnnnnnnnnnnnnnnnnnnnnnnnnnnnnnnnnnnnnnnnnnnnnnnnnnnnnnnnnnnnnnnnnnnnnnnnnnnnnnnnnnnnnnnnnnnnnnnnnnnnnnnnnnnnnnnnnnnnnnnnnnnnnnnnnnnnnnnnnnnnnnnnnnnnnnnnnnnnnnnnnnnnnnnnnnnnnnnnnnnnnnnnnnnnnnnnnnnnnnnnnnnnnnnnnnnnnnnnnnnnnnnnnnnnnnnnnnnnnnnnnnnnnnnnnnnnnnnnnnnnnnnnnnnnnnnnnnnnnnnnnnnnnnnnnnnnnnnnnnnnnnnnnnnnnnnnnnnnnnnnnnnnnnnnnnnnnnnnnnnnnnnnnnnnnnnnnnnnnnnnnnnnnnnnnnnnnnnnnnnnnnnnnnnnnnnnnnnnnnnnnnnnnnnnnnnnnnnnnnnnnnnnnnnnnnnnnnnnnnnnnnnnnnnnnnnnnnnnnnnnnnnnnnnnnnnnnnnnnnnnnnnnnnnnnnnnnnnnnnnnnnnnnnnnnnnnnnnnnnnnnnnnnnnnnnnnnnnnnnnnnnnnnnnnnnnnnnnnnnnnnnnnnnnnnnnnnnnnnnnnnnnnnnnnnnnnnnnnnnnnnnnnnnnnnnnnnnnnnnnnnnnnnnnnnnnnnnnnnnnnnnnnnnnnnnnnnnnnnnnnnnnnnnnnnnnnnnnnnnnnnnnnnnnnnnnnnnnnnnnnnnnnnnnnnnnnnnnnnnnnnnnnnnnnnnnnnnnnnnnnnnnnnnnnnnnnnnnnnnnnnnnnnnnnnnnnnnnnnnnnnnnnnnnnnnnnnnnnnnnnnnnnnnnnnnnnnnnnnnnnnnnnnnnnnnnnnnnnnnnnnnnnnnnnnnnnnnnnnnnnnnnnnnnnnnnnnnnnnnnnnnnnnnnnnnnnnnnnnnnnnnnnnnnnnnnnnnnnnnnnnnnnnnnnnnnnnnnnnnnnnnnnnnnnnnnnnnnnnnnnnnnnnnnnnnnnnnnnnnnnnnnnnnnnnnnnnnnnnnnnnnnnnnnnnnnnnnnnnnnnnnnnnnnnnnnnnnnnnnnnnnnnnnnnnnnnnnnnnnnnnnnnnnnnnnnnnnnnnnnnnnnnnnnnnnnnnnnnnnnnnnnnnnnnnnnnnnnnnnnnnnnnnnnnnnnnnnnnnnnnnnnnnnnnnnnnnnnnnnnnnnnnnnnnnnnnnnnnnnnnnnnnnnnnnnnnnnnnnnnnnnnnnnnnnnnnnnnnnnnnnnnnnnnnnnnnnnnnnnnnnnnnnnnnnnnnnnnnnnnnnnnnnnnnnnnnnnnnnnnnnnnnnnnnnnnnnnnnnnnnnnnnnnnnnnnnnnnnnnnnnnnnnnnnnnnnnnnnnnnnnnnnnnnnnnnnnnnnnnnnnnnnnnnnnnnnnnnnnnnnnnnnnnnnnnnnnnnnnnnnnnnnnnnnnnnnnnnnnnnnnnnnnnnnnnnnnnnnnnnnnnnnnnnnnnnnnnnnnnnnnnnnnnnnnnnnnnnnnnnnnnnnnnnnnnnnnnnnnnnnnnnnnnnnnnnnnnnnnnnnnnnnnnnnnnnnnnnnnnnnnnnnnnnnnnnnnnnnnnnnnnnnnnnnnnnnnnnnnnnnnnnnnnnnnnnnnnnnnnnnnnnnnnnnnnnnnnnnnnnnnnnnnnnnnnnnnnnnnnnnnnnnnnnnnnnnnnnnnnnnnnnnnnnnnnnnnnnnnnnnnnnnnnnnnnnnnnnnnnnnnnnnnnnnnnnnnnnnnnnnnnnnnnnnnnnnnnnnnnnnnnnnnnnnnnnnnnnnnnnnnnnnnnnnnnnnnnnnnnnnnnnnnnnnnnnnnnnnnnnnnnnnnnnnnnnnnnnnnnnnnnnnnnnnnnnnnnnnnnnnnnnnnnnnnnnnnnnnnnnnnnnnnnnnnnnnnnnnnnnnnnnnnnnnnnnnnnnnnnnnnnnnnnnnnnnnnnnnnnnnnnnnnnnnnnnnnnnnnnnnnnnnnnnnnnnnnnnnnnnnnnnnnnnnnnnnnnnnnnnnnnnnnnnnnnnnnnnnnnnnnnnnnnnnnnnnnnnnnnnnnnnnnnnnnnnnnnnnnnnnnnnnnnnnnnnnnnnnnnnnnnnnnnnnnnnnnnnnnnnnnnnnnnnnnnnnnnnnnnnnnnnnnnnnnnnnnnnnnnnnnnnnnnnnnnnnnnnnnnnnnnnnnnnnnnnnnnnnnnnnnnnnnnnnnnnnnnnnnnnnnnnnnnnnnnnnnnnnnnnnnnnnnnnnnnnnnnnnnnnnnnnnnnnnnnnnnnnnnnnnnnnnnnnnnnnnnnnnnnnnnnnnnnnnnnnnnnnnnnnnnnnnnnnnnnnnnnnnnnnnnnnnnnnnnnnnnnnnnnnnnnnnnnnnnnnnnnnnnnnnnnnnnnnnnnnnnnnnnnnnnnnnnnnnnnnnnnnnnnnnnnnnnnnnnnnnnnnnnnnnnnnnnnnnnnnnnnnnnnnnnnnnnnnnnnnnnnnnnnnnnnnnnnnnnnnnnnnnnnnnnnnnnnnnnnnnnnnnnnnnnnnnnnnnnnnnnnnnnnnnnnnnnnnnnnnnnnnnnnnnnnnnnnnnnnnnnnnnnnnnnnnnnnnnnnnnnnnnnnnnnnnnnnnnnnnnnnnnnnnnnnnnnnnnnnnnnnnnnnnnnnnnnnnnnnnnnnnnnnnnnnnnnnnnnnnnnnnnnnnnnnnnnnnnnnnnnnnnnnnnnnnnnnnnnnnnnnnnnnnnnnnnnnnnnnnnnnnnnnnnnnnnnnnnnnnnnnnnnnnnnnnnnnnnnnnnnnnnnnnnnnnnnnnnnnnnnnnnnnnnnnnnnnnnnnnnnnnnnnnnnnnnnnnnnnnnnnnnnnnnnnnnnnnnnnnnnnnnnnnnnnnnnnnnnnnnnnnnnnnnnnnnnnnnnnnnnnnnnnnnnnnnnnnnnnnnnnnnnnnnnnnnnnnnnnnnnnnnnnnnnnnnnnnnnnnnnnnnnnnnnnnnnnnnnnnnnnnnnnnnnnnnnnnnnnnnnnnnnnnnnnnnnnnnnnnnnnnnnnnnnnnnnnnnnnnnnnnnnnnnnnnnnnnnnnnnnnnnnnnnnnnnnnnnnnnnnnnnnnnnnnnnnnnnnnnnnnnnnnnnnnnnnnnnnnnnnnnnnnnnnnnnnnnnnnnnnnnnnnnnnnnnnnnnnnnnnnnnnnnnnnnnnnnnnnnnnnnnnnnnnnnnnnnnnnnnnnnnnnnnnnnnnnnnnnnnnnnnnnnnnnnnnnnnnnnnnnnnnnnnnnnnnnnnnnnnnnnnnnnnnnnnnnnnnnnnnnnnnnnnnnnnnnnnnnnnnnnnnnnnnnnnnnnnnnnnnnnnnnnnnnnnnnnnnnnnnnnnnnnnnnnnnnnnnnnnnnnnnnnnnnnnnnnnnnnnnnnnnnnnnnnnnnnnnnnnnnnnnnnnnnnnnnnnnnnnnnnnnnnnnnnnnnnnnnnnnnnnnnnnnnnnnnnnnnnnnnnnnnnnnnnnnnnnnnnnnnnnnnnnnnnnnnnnnnnnnnnnnnnnnnnnnnnnnnnnnnnnnnnnnnnnnnnnnnnnnnnnnnnnnnnnnnnnnnnnnnnnnnnnnnnnnnnnnnnnnnnnnnnnnnnnnnnnnnnnnnnnnnnnnnnnnnnnnnnnnnnnnnnnnnnnnnnnnnnnnnnnnnnnnnnnnnnnnnnnnnnnnnnnnnnnnnnnnnnnnnnnnnnnnnnnnnnnnnnnnnnnnnnnnnnnnnnnnnnnnnnnnnnnnnnnnnnnnnnnnnnnnnnnnnnnnnnnnnnnnnnnnnnnnnnnnnnnnnnnnnnnnnnnnnnnnnnnnnnnnnnnnnnnnnnnnnnnnnnnnnnnnnnnnnnnnnnnnnnnnnnnnnnnnnnnnnnnnnnnnnnnnnnnnnnnnnnnnnnnnnnnnnnnnnnnnnnnnnnnnnnnnnnnnnnnnnnnnnnnnnnnnnnnnnnnnnnnnnnnnnnnnnnnnnnnnnnnnnnnnnnnnnnnnnnnnnnnnnnnnnnnnnnnnnnnnnnnnnnnnnnnnnnnnnnnnnnnnnnnnnnnnnnnnnnnnnnnnnnnnnnnnnnnnnnnnnnnnnnnnnnnnnnnnnnnnnnnnnnnnnnnnnnnnnnnnnnnnnnnnnnnnnnnnnnnnnnnnnnnnnnnnnnnnnnnnnnnnnnnnnnnnnnnnnnnnnnnnnnnnnnnnnnnnnnnnnnnnnnnnnnnnnnnnnnnnnnnnnnnnnnnnnnnnnnnnnnnnnnnnnnnnnnnnnnnnnnnnnnnnnnnnnnnnnnnnnnnnnnnnnnnnnnnnnnnnnnnnnnnnnnnnnnnnnnnnnnnnnnnnnnnnnnnnnnnnnnnnnnnnnnnnnnnnnnnnnnnnnnnnnnnnnnnnnnnnnnnnnnnnnnnnnnnnnnnnnnnnnnnnnnnnnnnnnnnnnnnnnnnnnnnnnnnnnnnnnnnnnnnnnnnnnnnnnnnnnnnnnnnnnnnnnnnnnnnnnnnnnnnnnnnnnnnnnnnnnnnnnnnnnnnnnnnnnnnnnnnnnnnnnnnnnnnnnnnnnnnnnnnnnnnnnnnnnnnnnnnnnnnnnnnnnnnnnnnnnnnnnnnnnnnnnnnnnnnnnnnnnnnnnnnnnnnnnnnnnnnnnnnnnnnnnnnnnnnnnnnnnnnnnnnnnnnnnnnnnnnnnnnnnnnnnnnnnnnnnnnnnnnnnnnnnnnnnnnnnnnnnnnnnnnnnnnnnnnnnnnnnnnnnnnnnnnnnnnnnnnnnnnnnnnnnnnnnnnnnnnnnnnnnnnnnnnnnnnnnnnnnnnnnnnnnnnnnnnnnnnnnnnnnnnnnnnnnnnnnnnnnnnnnnnnnnnnnnnnnnnnnnnnnnnnnnnnnnnnnnnnnnnnnnnnnnnnnnnnnnnnnnnnnnnnnnnnnnnnnnnnnnnnnnnnnnnnnnnnnnnnnnnnnnnnnnnnnnnnnnnnnnnnnnnnnnnnnnnnnnnnnnnnnnnnnnnnnnnnnnnnnnnnnnnnnnnnnnnnnnnnnnnnnnnnnnnnnnnnnnnnnnnnnnnnnnnnnnnnnnnnnnnnnnnnnnnnnnnnnnnnnnnnnnnnnnnnnnnnnnnnnnnnnnnnnnnnnnnnnnnnnnnnnnnnnnnnnnnnnnnnnnnnnnnnnnnnnnnnnnnnnnnnnnnnnnnnnnnnnnnnnnnnnnnnnnnnnnnnnnnnnnnnnnnnnnnnnnnnnnnnnnnnnnnnnnnnnnnnnnnnnnnnnnnnnnnnnnnnnnnnnnnnnnnnnnnnnnnnnnnnnnnnnnnnnnnnnnnnnnnnnnnnnnnnnnnnnnnnnnnnnnnnnnnnnnnnnnnnnnnnnnnnnnnnnnnnnnnnnnnnnnnnnnnnnnnnnnnnnnnnnnnnnnnnnnnnnnnnnnnnnnnnnnnnnnnnnnnnnnnnnnnnnnnnnnnnnnnnnnnnnnnnnnnnnnnnnnnnnnnnnnnnnnnnnnnnnnnnnnnnnnnnnnnnnnnnnnnnnnnnnnnnnnnnnnnnnnnnnnnnnnnnnnnnnnnnnnnnnnnnnnnnnnnnnnnnnnnnnnnnnnnnnnnnnnnnnnnnnnnnnnnnnnnnnnnnnnnnnnnnnnnnnnnnnnnnnnnnnnnnnnnnnnnnnnnnnnnnnnnnnnnnnnnnnnnnnnnnnnnnnnnnnnnnnnnnnnnnnnnnnnnnnnnnnnnnnnnnnnnnnnnnnnnnnnnnnnnnnnnnnnnnnnnnnnnnnnnnnnnnnnnnnnnnnnnnnnnnnnnnnnnnnnnnnnnnnnnnnnnnnnnnnnnnnnnnnnnnnnnnnnnnnnnnnnnnnnnnnnnnnnnnnnnnnnnnnnnnnnnnnnnnnnnnnnnnnnnnnnnnnnnnnnnnnnnnnnnnnnnnnnnnnnnnnnnnnnnnnnnnnnnnnnnnnnnnnnnnnnnnnnnnnnnnnnnnnnnnnnnnnnnnnnnnnnnnnnnnnnnnnnnnnnnnnnnnnnnnnnnnnnnnnnnnnnnnnnnnnnnnnnnnnnnnnnnnnnnnnnnnnnnnnnnnnnnnnnnnnnnnnnnnnnnnnnnnnnnnnnnnnnnnnnnnnnnnnnnnnnnnnnnnnnnnnnnnnnnnnnnnnnnnnnnnnnnnnnnnnnnnnnnnnnnnnnnnnnnnnnnnnnnnnnnnnnnnnnnnnnnnnnnnnnnnnnnnnnnnnnnnnnnnnnnnnnnnnnnnnnnnnnnnnnnnnnnnnnnnnnnnnnnnnnnnnnnnnnnnnnnnnnnnnnnnnnnnnnnnnnnnnnnnnnnnnnnnnnnnnnnnnnnnnnnnnnnnnnnnnnnnnnnnnnnnnnnnnnnnnnnnnnnnnnnnnnnnnnnnnnnnnnnnnnnnnnnnnnnnnnnnnnnnnnnnnnnnnnnnnnnnnnnnnnnnnnnnnnnnnnnnnnnnnnnnnnnnnnnnnnnnnnnnnnnnnnnnnnnnnnnnnnnnnnnnnnnnnnnnnnnnnnnnnnnnnnnnnnnnnnnnnnnnnnnnnnnnnnnnnnnnnnnnnnnnnnnnnnnnnnnnnnnnnnnnnnnnnnnnnnnnnnnnnnnnnnnnnnnnnnnnnnnnnnnnnnnnnnnnnnnnnnnnnnnnnnnnnnnnnnnnnnnnnnnnnnnnnnnnnnnnnnnnnnnnnnnnnnnnnnnnnnnnnnnnnnnnnnnnnnnnnnnnnnnnnnnnnnnnnnnnnnnnnnnnnnnnnnnnnnnnnnnnnnnnnnnnnnnnnnnnnnnnnnnnnnnnnnnnnnnnnnnnnnnnnnnnnnnnnnnnnnnnnnnnnnnnnnnnnnnnnnnnnnnnnnnnnnnnnnnnnnnnnnnnnnnnnnnnnnnnnnnnnnnnnnnnnnnnnnnnnnnnnnnnnnnnnnnnnnnnnnnnnnnnnnnnnnnnnnnnnnnnnnnnnnnnnnnnnnnnnnnnnnnnnnnnnnnnnnnnnnnnnnnnnnnnnnnnnnnnnnnnnnnnnnnnnnnnnnnnnnnnnnnnnnnnnnnnnnnnnnnnnnnnnnnnnnnnnnnnnnnnnnnnnnnnnnnnnnnnnnnnnnnnnnnnnnnnnnnnnnnnnnnnnnnnnnnnnnnnnnnnnnnnnnnnnnnnnnnnnnnnnnnnnnnnnnnnnnnnnnnnnnnnnnnnnnnnnnnnnnnnnnnnnnnnnnnnnnnnnnnnnnnnnnnnnnnnnnnnnnnnnnnnnnnnnnnnnnnnnnnnnnnnnnnnnnnnnnnnnnnnnnnnnnnnnnnnnnnnnnnnnnnnnnnnnnnnnnnnnnnnnnnnnnnnnnnnnnnnnnnnnnnnnnnnnnnnnnnnnnnnnnnnnnnnnnnnnnnnnnnnnnnnnnnnnnnnnnnnnnnnnnnnnnnnnnnnnnnnnnnnnnnnnnnnnnnnnnnnnnnnnnnnnnnnnnnnnnnnnnnnnnnnnnnnnnnnnnnnnnnnnnnnnnnnnnnnnnnnnnnnnnnnnnnnnnnnnnnnnnnnnnnnnnnnnnnnnnnnnnnnnnnnnnnnnnnnnnnnnnnnnnnnnnnnnnnnnnnnnnnnnnnnnnnnnnnnnnnnnnnnnnnnnnnnnnnnnnnnnnnnnnnnnnnnnnnnnnnnnnnnnnnnnnnnnnnnnnnnnnnnnnnnnnnnnnnnnnnnnnnnnnnnnnnnnnnnnnnnnnnnnnnnnnnnnnnnnnnnnnnnnnnnnnnnnnnnnnnnnnnnnnnnnnnnnnnnnnnnnnnnnnnnnnnnnnnnnnnnnnnnnnnnnnnnnnnnnnnnnnnnnnnnnnnnnnnnnnnnnnnnnnnnnnnnnnnnnnnnnnnnnnnnnnnnnnnnnnnnnnnnnnnnnnnnnnnnnnnnnnnnnnnnnnnnnnnnnnnnnnnnnnnnnnnnnnnnnnnnnnnnnnnnnnnnnnnnnnnnnnnnnnnnnnnnnnnnnnnnnnnnnnnnnnnnnnnnnnnnnnnnnnnnnnnnnnnnnnnnnnnnnnnnnnnnnnnnnnnnnnnnnnnnnnnnnnnnnnnnnnnnnnnnnnnnnnnnnnnnnnnnnnnnnnnnnnnnnnnnnnnnnnnnnnnnnnnnnnnnnnnnnnnnnnnnnnnnnnnnnnnnnnnnnnnnnnnnnnnnnnnnnnnnnnnnnnnnnnnnnnnnnnnnnnnnnnnnnnnnnnnnnnnnnnnnnnnnnnnnnnnnnnnnnnnnnnnnnnnnnnnnnnnnnnnnnnnnnnnnnnnnnnnnnnnnnnnnnnnnnnnnnnnnnnnnnnnnnnnnnnnnnnnnnnnnnnnnnnnnnnnnnnnnnnnnnnnnnnnnnnnnnnnnnnnnnnnnnnnnnnnnnnnnnnnnnnnnnnnnnnnnnnnnnnnnnnnnnnnnnnnnnnnnnnnnnnnnnnnnnnnnnnnnnnnnnnnnnnnnnnnnnnnnnnnnnnnnnnnnnnnnnnnnnnnnnnnnnnnnnnnnnnnnnnnnnnnnnnnnnnnnnnnnnnnnnnnnnnnnnnnnnnnnnnnnnnnnnnnnnnnnnnnnnnnnnnnnnnnnnnnnnnnnnnnnnnnnnnnnnnnnnnnnnnnnnnnnnnnnnnnnnnnnnnnnnnnnnnnnnnnnnnnnnnnnnnnnnnnnnnnnnnnnnnnnnnnnnnnnnnnnnnnnnnnnnnnnnnnnnnnnnnnnnnnnnnnnnnnnnnnnnnnnnnnnnnnnnnnnnnnnnnnnnnnnnnnnnnnnnnnnnnnnnnnnnnnnnnnnnnnnnnnnnnnnnnnnnnnnnnnnnnnnnnnnnnnnnnnnnnnnnnnnnnnnnnnnnnnnnnnnnnnnnnnnnnnnnnnnnnnnnnnnnnnnnnnnnnnnnnnnnnnnnnnnnnnnnnnnnnnnnnnnnnnnnnnnnnnnnnnnnnnnnnnnnnnnnnnnnnnnnnnnnnnnnnnnnnnnnnnnnnnnnnnnnnnnnnnnnnnnnnnnnnnnnnnnnnnnnnnnnnnnnnnnnnnnnnnnnnnnnnnnnnnnnnnnnnnnnnnnnnnnnnnnnnnnnnnnnnnnnnnnnnnnnnnnnnnnnnnnnnnnnnnnnnnnnnnnnnnnnnnnnnnnnnnnnnnnnnnnnnnnnnnnnnnnnnnnnnnnnnnnnnnnnnnnnnnnnnnnnnnnnnnnnnnnnnnnnnnnnnnnnnnnnnnnnnnnnnnnnnnnnnnnnnnnnnnnnnnnnnnnnnnnnnnnnnnnnnnnnnnnnnnnnnnnnnnnnnnnnnnnnnnnnnnnnnnnnnnnnnnnnnnnnnnnnnnnnnnnnnnnnnnnnnnnnnnnnnnnnnnnnnnnnnnnnnnnnnnnnnnnnnnnnnnnnnnnnnnnnnnnnnnnnnnnnnnnnnnnnnnnnnnnnnnnnnnnnnnnnnnnnnnnnnnnnnnnnnnnnnnnnnnnnnnnnnnnnnnnnnnnnnnnnnnnnnnnnnnnnnnnnnnnnnnnnnnnnnnnnnnnnnnnnnnnnnnnnnnnnnnnnnnnnnnnnnnnnnnnnnnnnnnnnnnnnnnnnnnnnnnnnnnnnnnnnnnnnnnnnnnnnnnnnnnnnnnnnnnnnnnnnnnnnnnnnnnnnnnnnnnnnnnnnnnnnnnnnnnnnnnnnnnnnnnnnnnnnnnnnnnnnnnnnnnnnnnnnnnnnnnnnnnnnnnnnnnnnnnnnnnnnnnnnnnnnnnnnnnnnnnnnnnnnnnnnnnnnnnnnnnnnnnnnnnnnnnnnnnnnnnnnnnnnnnnnnnnnnnnnnnnnnnnnnnnnnnnnnnnnnnnnnnnnnnnnnnnnnnnnnnnnnnnnnnnnnnnnnnnnnnnnnnnnnnnnnnnnnnnnnnnnnnnnnnnnnnnnnnnnnnnnnnnnnnnnnnnnnnnnnnnnnnnnnnnnnnnnnnnnnnnnnnnnnnnnnnnnnnnnnnnnnnnnnnnnnnnnnnnnnnnnnnnnnnnnnnnnnnnnnnnnnnnnnnnnnnnnnnnnnnnnnnnnnnnnnnnnnnnnnnnnnnnnnnnnnnnnnnnnnnnnnnnnnnnnnnnnnnnnnnnnnnnnnnnnnnnnnnnnnnnnnnnnnnnnnnnnnnnnnnnnnnnnnnnnnnnnnnnnnnnnnnnnnnnnnnnnnnnnnnnnnnnnnnnnnnnnnnnnnnnnnnnnnnnnnnnnnnnnnnnnnnnnnnnnnnnnnnnnnnnnnnnnnnnnnnnnnnnnnnnnnnnnnnnnnnnnnnnnnnnnnnnnnnnnnnnnnnnnnnnnnnnnnnnnnnnnnnnnnnnnnnnnnnnnnnnnnnnnnnnnnnnnnnnnnnnnnnnnnnnnnnnnnnnnnnnnnnnnnnnnnnnnnnnnnnnnnnnnnnnnnnnnnnnnnnnnnnnnnnnnnnnnnnnnnnnnnnnnnnnnnnnnnnnnnnnnnnnnnnnnnnnnnnnnnnnnnnnnnnnnnnnnnnnnnnnnnnnnnnnnnnnnnnnnnnnnnnnnnnnnnnnnnnnnnnnnnnnnnnnnnnnnnnnnnnnnnnnnnnnnnnnnnnnnnnnnnnnnnnnnnnnnnnnnnnnnnnnnnnnnnnnnnnnnnnnnnnnnnnnnnnnnnnnnnnnnnnnnnnnnnnnnnnnnnnnnnnnnnnnnnnnnnnnnnnnnnnnnnnnnnnnnnnnnnnnnnnnnnnnnnnnnnnnnnnnnnnnnnnnnnnnnnnnnnnnnnnnnnnnnnnnnnnnnnnnnnnnnnnnnnnnnnnnnnnnnnnnnnnnnnnnnnnnnnnnnnnnnnnnnnnnnnnnnnnnnnnnnnnnnnnnnnnnnnnnnnnnnnnnnnnnnnnnnnnnnnnnnnnnnnnnnnnnnnnnnnnnnnnnnnnnnnnnnnnnnnnnnnnnnnnnnnnnnnnnnnnnnnnnnnnnnnnnnnnnnnnnnnnnnnnnnnnnnnnnnnnnnnnnnnnnnnnnnnnnnnnnnnnnnnnnnnnnnnnnnnnnnnnnnnnnnnnnnnnnnnnnnnnnnnnnnnnnnnnnnnnnnnnnnnnnnnnnnnnnnnnnnnnnnnnnnnnnnnnnnnnnnnnnnnnnnnnnnnnnnnnnnnnnnnnnnnnnnnnnnnnnnnnnnnnnnnnnnnnnnnnnnnnnnnnnnnnnnnnnnnnnnnnnnnnnnnnnnnnnnnnnnnnnnnnnnnnnnnnnnnnnnnnnnnnnnnnnnnnnnnnnnnnnnnnnnnnnnnnnnnnnnnnnnnnnnnnnnnnnnnnnnnnnnnnnnnnnnnnnnnnnnnnnnnnnnnnnnnnnnnnnnnnnnnnnnnnnnnnnnnnnnnnnnnnnnnnnnnnnnnnnnnnnnnnnnnnnnnnnnnnnnnnnnnnnnnnnnnnnnnnnnnnnnnnnnnnnnnnnnnnnnnnnnnnnnnnnnnnnnnnnnnnnnnnnnnnnnnnnnnnnnnnnnnnnnnnnnnnnnnnnnnnnnnnnnnnnnnnnnnnnnnnnnnnnnnnnnnnnnnnnnnnnnnnnnnnnnnnnnnnnnnnnnnnnnnnnnnnnnnnnnnnnnnnnnnnnnnnnnnnnnnnnnnnnnnnnnnnnnnnnnnnnnnnnnnnnnnnnnnnnnnnnnnnnnnnnnnnnnnnnnnnnnnnnnnnnnnnnnnnnnnnnnnnnnnnnnnnnnnnnnnnnnnnnnnnnnnnnnnnnnnnnnnnnnnnnnnnnnnnnnnnnnnnnnnnnnnnnnnnnnnnnnnnnnnnnnnnnnnnnnnnnnnnnnnnnnnnnnnnnnnnnnnnnnnnnnnnnnnnnnnnnnnnnnnnnnnnnnnnnnnnnnnnnnnnnnnnnnnnnnnnnnnnnnnnnnnnnnnnnnnnnnnnnnnnnnnnnnnnnnnnnnnnnnnnnnnnnnnnnnnnnnnnnnnnnnnnnnnnnnnnnnnnnnnnnnnnnnnnnnnnnnnnnnnnnnnnnnnnnnnnnnnnnnnnnnnnnnnnnnnnnnnnnnnnnnnnnnnnnnnnnnnnnnnnnnnnnnnnnnnnnnnnnnnnnnnnnnnnnnnnnnnnnnnnnnnnnnnnnnnnnnnnnnnnnnnnnnnnnnnnnnnnnnnnnnnnnnnnnnnnnnnnnnnnnnnnnnnnnnnnnnnnnnnnnnnnnnnnnnnnnnnnnnnnnnnnnnnnnnnnnnnnnnnnnnnnnnnnnnnnnnnnnnnnnnnnnnnnnnnnnnnnnnnnnnnnnnnnnnnnnnnnnnnnnnnnnnnnnnnnnnnnnnnnnnnnnnnnnnnnnnnnnnnnnnnnnnnnnnnnnnnnnnnnnnnnnnnnnnnnnnnnnnnnnnnnnnnnnnnnnnnnnnnnnnnnnnnnnnnnnnnnnnnnnnnnnnnnnnnnnnnnnnnnnnnnnnnnnnnnnnnnnnnnnnnnnnnnnnnnnnnnnnnnnnnnnnnnnnnnnnnnnnnnnnnnnnnnnnnnnnnnnnnnnnnnnnnnnnnnnnnnnnnnnnnnnnnnnnnnnnnnnnnnnnnnnnnnnnnnnnnnnnnnnnnnnnnnnnnnnnnnnnnnnnnnnnnnnnnnnnnnnnnnnnnnnnnnnnnnnnnnnnnnnnnnnnnnnnnnnnnnnnnnnnnnnnnnnnnnnnnnnnnnnnnnnnnnnnnnnnnnnnnnnnnnnnnnnnnnnnnnnnnnnnnnnnnnnnnnnnnnnnnnnnnnnnnnnnnnnnnnnnnnnnnnnnnnnnnnnnnnnnnnnnnnnnnnnnnnnnnnnnnnnnnnnnnnnnnnnnnnnnnnnnnnnnnnnnnnnnnnnnnnnnnnnnnnnnnnnnnnnnnnnnnnnnnnnnnnnnnnnnnnnnnnnnnnnnnnnnnnnnnnnnnnnnnnnnnnnnnnnnnnnnnnnnnnnnnnnnnnnnnnnnnnnnnnnnnnnnnnnnnnnnnnnnnnnnnnnnnnnnnnnnnnnnnnnnnnnnnnnnnnnnnnnnnnnnnnnnnnnnnnnnnnnnnnnnnnnnnnnnnnnnnnnnnnnnnnnnnnnnnnnnnnnnnnnnnnnnnnnnnnnnnnnnnnnnnnnnnnnnnnnnnnnnnnnnnnnnnnnnnnnnnnnnnnnnnnnnnnnnnnnnnnnnnnnnnnnnnnnnnnnnnnnnnnnnnnnnnnnnnnnnnnnnnnnnnnnnnnnnnnnnnnnnnnnnnnnnnnnnnnnnnnnnnnnnnnnnnnnnnnnnnnnnnnnnnnnnnnnnnnnnnnnnnnnnnnnnnnnnnnnnnnnnnnnnnnnnnnnnnnnnnnnnnnnnnnnnnnnnnnnnnnnnnnnnnnnnnnnnnnnnnnnnnnnnnnnnnnnnnnnnnnnnnnnnnnnnnnnnnnnnnnnnnnnnnnnnnnnnnnnnnnnnnnnnnnnnnnnnnnnnnnnnnnnnnnnnnnnnnnnnnnnnnnnnnnnnnnnnnnnnnnnnnnnnnnnnnnnnnnnnnnnnnnnnnnnnnnnnnnnnnnnnnnnnnnnnnnnnnnnnnnnnnnnnnnnnnnnnnnnnnnnnnnnnnnnnnnnnnnnnnnnnnnnnnnnnnnnnnnnnnnnnnnnnnnnnnnnnnnnnnnnnnnnnnnnnnnnnnnnnnnnnnnnnnnnnnnnnnnnnnnnnnnnnnnnnnnnnnnnnnnnnnnnnnnnnnnnnnnnnnnnnnnnnnnnnnnnnnnnnnnnnnnnnnnnnnnnnnnnnnnnnnnnnnnnnnnnnnnnnnnnnnnnnnnnnnnnnnnnnnnnnnnnnnnnnnnnnnnnnnnnnnnnnnnnnnnnnnnnnnnnnnnnnnnnnnnnnnnnnnnnnnnnnnnnnnnnnnnnnnnnnnnnnnnnnnnnnnnnnnnnnnnnnnnnnnnnnnnnnnnnnnnnnnnnnnnnnnnnnnnnnnnnnnnnnnnnnnnnnnnnnnnnnnnnnnnnnnnnnnnnnnnnnnnnnnnnnnnnnnnnnnnnnnnnnnnnnnnnnnnnnnnnnnnnnnnnnnnnnnnnnnnnnnnnnnnnnnnnnnnnnnnnnnnnnnnnnnnnnnnnnnnnnnnnnnnnnnnnnnnnnnnnnnnnnnnnnnnnnnnnnnnnnnnnnnnnnnnnnnnnnnnnnnnnnnnnnnnnnnnnnnnnnnnnnnnnnnnnnnnnnnnnnnnnnnnnnnnnnnnnnnnnnnnnnnnnnnnnnnnnnnnnnnnnnnnnnnnnnnnnnnnnnnnnnnnnnnnnnnnnnnnnnnnnnnnnnnnnnnnnnnnnnnnnnnnnnnnnnnnnnnnnnnnnnnnnnnnnnnnnnnnnnnnnnnnnnnnnnnnnnnnnnnnnnnnnnnnnnnnnnnnnnnnnnnnnnnnnnnnnnnnnnnnnnnnnnnnnnnnnnnnnnnnnnnnnnnnnnnnnnnnnnnnnnnnnnnnnnnnnnnnnnnnnnnnnnnnnnnnnnnnnnnnnnnnnnnnnnnnnnnnnnnnnnnnnnnnnnnnnnnnnnnnnnnnnnnnnnnnnnnnnnnnnnnnnnnnnnnnnnnnnnnnnnnnnnnnnnnnnnnnnnnnnnnnnnnnnnnnnnnnnnnnnnnnnnnnnnnnnnnnnnnnnnnnnnnnnnnnnnnnnnnnnnnnnnnnnnnnnnnnnnnnnnnnnnnnnnnnnnnnnnnnnnnnnnnnnnnnnnnnnnnnnnnnnnnnnnnnnnnnnnnnnnnnnnnnnnnnnnnnnnnnnnnnnnnnnnnnnnnnnnnnnnnnnnnnnnnnnnnnnnnnnnnnnnnnnnnnnnnnnnnnnnnnnnnnnnnnnnnnnnnnnnnnnnnnnnnnnnnnnnnnnnnnnnnnnnnnnnnnnnnnnnnnnnnnnnnnnnnnnnnnnnnnnnnnnnnnnnnnnnnnnnnnnnnnnnnnnnnnnnnnnnnnnnnnnnnnnnnnnnnnnnnnnnnnnnnnnnnnnnnnnnnnnnnnnnnnnnnnnnnnnnnnnnnnnnnnnnnnnnnnnnnnnnnnnnnnnnnnnnnnnnnnnnnnnnnnnnnnnnnnnnnnnnnnnnnnnnnnnnnnnnnnnnnnnnnnnnnnnnnnnnnnnnnnnnnnnnnnnnnnnnnnnnnnnnnnnnnnnnnnnnnnnnnnnnnnnnnnnnnnnnnnnnnnnnnnnnnnnnnnnnnnnnnnnnnnnnnnnnnnnnnnnnnnnnnnnnnnnnnnnnnnnnnnnnnnnnnnnnnnnnnnnnnnnnnnnnnnnnnnnnnnnnnnnnnnnnnnnnnnnnnnnnnnnnnnnnnnnnnnnnnnnnnnnnnnnnnnnnnnnnnnnnnnnnnnnnnnnnnnnnnnnnnnnnnnnnnnnnnnnnnnnnnnnnnnnnnnnnnnnnnnnnnnnnnnnnnnnnnnnnnnnnnnnnnnnnnnnnnnnnnnnnnnnnnnnnnnnnnnnnnnnnnnnnnnnnnnnnnnnnnnnnnnnnnnnnnnnnnnnnnnnnnnnnnnnnnnnnnnnnnnnnnnnnnnnnnnnnnnnnnnnnnnnnnnnnnnnnnnnnnnnnnnnnnnnnnnnnnnnnnnnnnnnnnnnnnnnnnnnnnnnnnnnnnnnnnnnnnnnnnnnnnnnnnnnnnnnnnnnnnnnnnnnnnnnnnnnnnnnnnnnnnnnnnnnnnnnnnnnnnnnnnnnnnnnnnnnnnnnnnnnnnnnnnnnnnnnnnnnnnnnnnnnnnnnnnnnnnnnnnnnnnnnnnnnnnnnnnnnnnnnnnnnnnnnnnnnnnnnnnnnnnnnnnnnnnnnnnnnnnnnnnnnnnnnnnnnnnnnnnnnnnnnnnnnnnnnnnnnnnnnnnnnnnnnnnnnnnnnnnnnnnnnnnnnnnnnnnnnnnnnnnnnnnnnnnnnnnnnnnnnnnnnnnnnnnnnnnnnnnnnnnnnnnnnnnnnnnnnnnnnnnnnnnnnnnnnnnnnnnnnnnnnnnnnnnnnnnnnnnnnnnnnnnnnnnnnnnnnnnnnnnnnnnnnnnnnnnnnnnnnnnnnnnnnnnnnnnnnnnnnnnnnnnnnnnnnnnnnnnnnnnnnnnnnnnnnnnnnnnnnnnnnnnnnnnnnnnnnnnnnnnnnnnnnnnnnnnnnnnnnnnnnnnnnnnnnnnnnnnnnnnnnnnnnnnnnnnnnnnnnnnnnnnnnnnnnnnnnnnnnnnnnnnnnnnnnnnnnnnnnnnnnnnnnnnnnnnnnnnnnnnnnnnnnnnnnnnnnnnnnnnnnnnnnnnnnnnnnnnnnnnnnnnnnnnnnnnnnnnnnnnnnnnnnnnnnnnnnnnnnnnnnnnnnnnnnnnnnnnnnnnnnnnnnnnnnnnnnnnnnnnnnnnnnnnnnnnnnnnnnnnnnnnnnnnnnnnnnnnnnnnnnnnnnnnnnnnnnnnnnnnnnnnnnnnnnnnnnnnnnnnnnnnnnnnnnnnnnnnnnnnnnnnnnnnnnnnnnnnnnnnnnnnnnnnnnnnnnnnnnnnnnnnnnnnnnnnnnnnnnnnnnnnnnnnnnnnnnnnnnnnnnnnnnnnnnnnnnnnnnnnnnnnnnnnnnnnnnnnnnnnnnnnnnnnnnnnnnnnnnnnnnnnnnnnnnnnnnnnnnnnnnnnnnnnnnnnnnnnnnnnnnnnnnnnnnnnnnnnnnnnnnnnnnnnnnnnnnnnnnnnnnnnnnnnnnnnnnnnnnnnnnnnnnnnnnnnnnnnnnnnnnnnnnnnnnnnnnnnnnnnnnnnnnnnnnnnnnnnnnnnnnnnnnnnnnnnnnnnnnnnnnnnnnnnnnnnnnnnnnnnnnnnnnnnnnnnnnnnnnnnnnnnnnnnnnnnnnnnnnnnnnnnnnnnnnnnnnnnnnnnnnnnnnnnnnnnnnnnnnnnnnnnnnnnnnnnnnnnnnnnnnnnnnnnnnnnnnnnnnnnnnnnnnnnnnnnnnnnnnnnnnnnnnnnnnnnnnnnnnnnnnnnnnnnnnnnnnnnnnnnnnnnnnnnnnnnnnnnnnnnnnnnnnnnnnnnnnnnnnnnnnnnnnnnnnnnnnnnnnnnnnnnnnnnnnnnnnnnnnnnnnnnnnnnnnnnnnnnnnnnnnnnnnnnnnnnnnnnnnnnnnnnnnnnnnnnnnnnnnnnnnnnnnnnnnnnnnnnnnnnnnnnnnnnnnnnnnnnnnnnnnnnnnnnnnnnnnnnnnnnnnnnnnnnnnnnnnnnnnnnnnnnnnnnnnnnnnnnnnnnnnnnnnnnnnnnnnnnnnnnnnnnnnnnnnnnnnnnnnnnnnnnnnnnnnnnnnnnnnnnnnnnnnnnnnnnnnnnnnnnnnnnnnnnnnnnnnnnnnnnnnnnnnnnnnnnnnnnnnnnnnnnnnnnnnnnnnnnnnnnnnnnnnnnnnnnnnnnnnnnnnnnnnnnnnnnnnnnnnnnnnnnnnnnnnnnnnnnnnnnnnnnnnnnnnnnnnnnnnnnnnnnnnnnnnnnnnnnnnnnnnnnnnnnnnnnnnnnnnnnnnnnnnnnnnnnnnnnnnnnnnnnnnnnnnnnnnnnnnnnnnnnnnnnnnnnnnnnnnnnnnnnnnnnnnnnnnnnnnnnnnnnnnnnnnnnnnnnnnnnnnnnnnnnnnnnnnnnnnnnnnnnnnnnnnnnnnnnnnnnnnnnnnnnnnnnnnnnnnnnnnnnnnnnnnnnnnnnnnnnnnnnnnnnnnnnnnnnnnnnnnnnnnnnnnnnnnnnnnnnnnnnnnnnnnnnnnnnnnnnnnnnnnnnnnnnnnnnnnnnnnnnnnnnnnnnnnnnnnnnnnnnnnnnnnnnnnnnnnnnnnnnnnnnnnnnnnnnnnnnnnnnnnnnnnnnnnnnnnnnnnnnnnnnnnnnnnnnnnnnnnnnnnnnnnnnnnnnnnnnnnnnnnnnnnnnnnnnnnnnnnnnnnnnnnnnnnnnnnnnnnnnnnnnnnnnnnnnnnnnnnnnnnnnnnnnnnnnnnnnnnnnnnnnnnnnnnnnnnnnnnnnnnnnnnnnnnnnnnnnnnnnnnnnnnnnnnnnnnnnnnnnnnnnnnnnnnnnnnnnnnnnnnnnnnnnnnnnnnnnnnnnnnnnnnnnnnnnnnnnnnnnnnnnnnnnnnnnnnnnnnnnnnnnnnnnnnnnnnnnnnnnnnnnnnnnnnnnnnnnnnnnnnnnnnnnnnnnnnnnnnnnnnnnnnnnnnnnnnnnnnnnnnnnnnnnnnnnnnnnnnnnnnnnnnnnnnnnnnnnnnnnnnnnnnnnnnnnnnnnnnnnnnnnnnnnnnnnnnnnnnnnnnnnnnnnnnnnnnnnnnnnnnnnnnnnnnnnnnnnnnnnnnnnnnnnnnnnnnnnnnnnnnnnnnnnnnnnnnnnnnnnnnnnnnnnnnnnnnnnnnnnnnnnnnnnnnnnnnnnnnnnnnnnnnnnnnnnnnnnnnnnnnnnnnnnnnnnnnnnnnnnnnnnnnnnnnnnnnnnnnnnnnnnnnnnnnnnnnnnnnnnnnnnnnnnnnnnnnnnnnnnnnnnnnnnnnnnnnnnnnnnnnnnnnnnnnnnnnnnnnnnnnnnnnnnnnnnnnnnnnnnnnnnnnnnnnnnnnnnnnnnnnnnnnnnnnnnnnnnnnnnnnnnnnnnnnnnnnnnnnnnnnnnnnnnnnnnnnnnnnnnnnnnnnnnnnnnnnnnnnnnnnnnnnnnnnnnnnnnnnnnnnnnnnnnnnnnnnnnnnnnnnnnnnnnnnnnnnnnnnnnnnnnnnnnnnnnnnnnnnnnnnnnnnnnnnnnnnnnnnnnnnnnnnnnnnnnnnnnnnnnnnnnnnnnnnnnnnnnnnnnnnnnnnnnnnnnnnnnnnnnnnnnnnnnnnnnnnnnnnnnnnnnnnnnnnnnnnnnnnnnnnnnnnnnnnnnnnnnnnnnnnnnnnnnnnnnnnnnnnnnnnnnnnnnnnnnnnnnnnnnnnnnnnnnnnnnnnnnnnnnnnnnnnnnnnnnnnnnnnnnnnnnnnnnnnnnnnnnnnnnnnnnnnnnnnnnnnnnnnnnnnnnnnnnnnnnnnnnnnnnnnnnnnnnnnnnnnnnnnnnnnnnnnnnnnnnnnnnnnnnnnnnnnnnnnnnnnnnnnnnnnnnnnnnnnnnnnnnnnnnnnnnnnnnnnnnnnnnnnnnnnnnnnnnnnnnnnnnnnnnnnnnnnnnnnnnnnnnnnnnnnnnnnnnnnnnnnnnnnnnnnnnnnnnnnnnnnnnnnnnnnnnnnnnnnnnnnnnnnnnnnnnnnnnnnnnnnnnnnnnnnnnnnnnnnnnnnnnnnnnnnnnnnnnnnnnnnnnnnnnnnnnnnnnnnnnnnnnnnnnnnnnnnnnnnnnnnnnnnnnnnnnnnnnnnnnnnnnnnnnnnnnnnnnnnnnnnnnnnnnnnnnnnnnnnnnnnnnnnnnnnnnnnnnnnnnnnnnnnnnnnnnnnnnnnnnnnnnnnnnnnnnnnnnnnnnnnnnnnnnnnnnnnnnnnnnnnnnnnnnnnnnnnnnnnnnnnnnnnnnnnnnnnnnnnnnnnnnnnnnnnnnnnnnnnnnnnnnnnnnnnnnnnnnnnnnnnnnnnnnnnnnnnnnnnnnnnnnnnnnnnnnnnnnnnnnnnnnnnnnnnnnnnnnnnnnnnnnnnnnnnnnnnnnnnnnnnnnnnnnnnnnnnnnnnnnnnnnnnnnnnnnnnnnnnnnnnnnnnnnnnnnnnnnnnnnnnnnnnnnnnnnnnnnnnnnnnnnnnnnnnnnnnnnnnnnnnnnnnnnnnnnnnnnnnnnnnnnnnnnnnnnnnnnnnnnnnnnnnnnnnnnnnnnnnnnnnnnnnnnnnnnnnnnnnnnnnnnnnnnnnnnnnnnnnnnnnnnnnnnnnnnnnnnnnnnnnnnnnnnnnnnnnnnnnnnnnnnnnnnnnnnnnnnnnnnnnnnnnnnnnnnnnnnnnnnnnnnnnnnnnnnnnnnnnnnnnnnnnnnnnnnnnnnnnnnnnnnnnnnnnnnnnnnnnnnnnnnnnnnnnnnnnnnnnnnnnnnnnnnnnnnnnnnnnnnnnnnnnnnnnnnnnnnnnnnnnnnnnnnnnnnnnnnnnnnnnnnnnnnnnnnnnnnnnnnnnnnnnnnnnnnnnnnnnnnnnnnnnnnnnnnnnnnnnnnnnnnnnnnnnnnnnnnnnnnnnnnnnnnnnnnnnnnnnnnnnnnnnnnnnnnnnnnnnnnnnnnnnnnnnnnnnnnnnnnnnnnnnnnnnnnnnnnnnnnnnnnnnnnnnnnnnnnnnnnnnnnnnnnnnnnnnnnnnnnnnnnnnnnnnnnnnnnnnnnnnnnnnnnnnnnnnnnnnnnnnnnnnnnnnnnnnnnnnnnnnnnnnnnnnnnnnnnnnnnnnnnnnnnnnnnnnnnnnnnnnnnnnnnnnnnnnnnnnnnnnnnnnnnnnnnnnnnnnnnnnnnnnnnnnnnnnnnnnnnnnnnnnnnnnnnnnnnnnnnnnnnnnnnnnnnnnnnnnnnnnnnnnnnnnnnnnnnnnnnnnnnnnnnnnnnnnnnnnnnnnnnnnnnnnnnnnnnnnnnnnnnnnnnnnnnnnnnnnnnnnnnnnnnnnnnnnnnnnnnnnnnnnnnnnnnnnnnnnnnnnnnnnnnnnnnnnnnnnnnnnnnnnnnnnnnnnnnnnnnnnnnnnnnnnnnnnnnnnnnnnnnnnnnnnnnnnnnnnnnnnnnnnnnnnnnnnnnnnnnnnnnnnnnnnnnnnnnnnnnnnnnnnnnnnnnnnnnnnnnnnnnnnnnnnnnnnnnnnnnnnnnnnnnnnnnnnnnnnnnnnnnnnnnnnnnnnnnnnnnnnnnnnnnnnnnnnnnnnnnnnnnnnnnnnnnnnnnnnnnnnnnnnnnnnnnnnnnnnnnnnnnnnnnnnnnnnnnnnnnnnnnnnnnnnnnnnnnnnnnnnnnnnnnnnnnnnnnnnnnnnnnnnnnnnnnnnnnnnnnnnnnnnnnnnnnnnnnnnnnnnnnnnnnnnnnnnnnnnnnnnnnnnnnnnnnnnnnnnnnnnnnnnnnnnnnnnnnnnnnnnnnnnnnnnnnnnnnnnnnnnnnnnnnnnnnnnnnnnnnnnnnnnnnnnnnnnnnnnnnnnnnnnnnnnnnnnnnnnnnnnnnnnnnnnnnnnnnnnnnnnnnnnnnnnnnnnnnnnnnnnnnnnnnnnnnnnnnnnnnnnnnnnnnnnnnnnnnnnnnnnnnnnnnnnnnnnnnnnnnnnnnnnnnnnnnnnnnnnnnnnnnnnnnnnnnnnnnnnnnnnnnnnnnnnnnnnnnnnnnnnnnnnnnnnnnnnnnnnnnnnnnnnnnnnnnnnnnnnnnnnnnnnnnnnnnnnnnnnnnnnnnnnnnnnnnnnnnnnnnnnnnnnnnnnnnnnnnnnnnnnnnnnnnnnnnnnnnnnnnnnnnnnnnnnnnnnnnnnnnnnnnnnnnnnnnnnnnnnnnnnnnnnnnnnnnnnnnnnnnnnnnnnnnnnnnnnnnnnnnnnnnnnnnnnnnnnnnnnnnnnnnnnnnnnnnnnnnnnnnnnnnnnnnnnnnnnnnnnnnnnnnnnnnnnnnnnnnnnnnnnnnnnnnnnnnnnnnnnnnnnnnnnnnnnnnnnnnnnnnnnnnnnnnnnnnnnnnnnnnnnnnnnnnnnnnnnnnnnnnnnnnnnnnnnnnnnnnnnnnnnnnnnnnnnnnnnnnnnnnnnnnnnnnnnnnnnnnnnnnnnnnnnnnnnnnnnnnnnnnnnnnnnnnnnnnnnnnnnnnnnnnnnnnnnnnnnnnnnnnnnnnnnnnnnnnnnnnnnnnnnnnnnnnnnnnnnnnnnnnnnnnnnnnnnnnnnnnnnnnnnnnnnnnnnnnnnnnnnnnnnnnnnnnnnnnnnnnnnnnnnnnnnnnnnnnnnnnnnnnnnnnnnnnnnnnnnnnnnnnnnnnnnnnnnnnnnnnnnnnnnnnnnnnnnnnnnnnnnnnnnnnnnnnnnnnnnnnnnnnnnnnnnnnnnnnnnnnnnnnnnnnnnnnnnnnnnnnnnnnnnnnnnnnnnnnnnnnnnnnnnnnnnnnnnnnnnnnnnnnnnnnnnnnnnnnnnnnnnnnnnnnnnnnnnnnnnnnnnnnnnnnnnnnnnnnnnnnnnnnnnnnnnnnnnnnnnnnnnnnnnnnnnnnnnnnnnnnnnnnnnnnnnnnnnnnnnnnnnnnnnnnnnnnnnnnnnnnnnnnnnnnnnnnnnnnnnnnnnnnnnnnnnnnnnnnnnnnnnnnnnnnnnnnnnnnnnnnnnnnnnnnnnnnnnnnnnnnnnnnnnnnnnnnnnnnnnnnnnnnnnnnnnnnnnnnnnnnnnnnnnnnnnnnnnnnnnnnnnnnnnnnnnnnnnnnnnnnnnnnnnnnnnnnnnnnnnnnnnnnnnnnnnnnnnnnnnnnnnnnnnnnnnnnnnnnnnnnnnnnnnnnnnnnnnnnnnnnnnnnnnnnnnnnnnnnnnnnnnnnnnnnnnnnnnnnnnnnnnnnnnnnnnnnnnnnnnnnnnnnnnnnnnnnnnnnnnnnnnnnnnnnnnnnnnnnnnnnnnnnnnnnnnnnnnnnnnnnnnnnnnnnnnnnnnnnnnnnnnnnnnnnnnnnnnnnnnnnnnnnnnnnnnnnnnnnnnnnnnnnnnnnnnnnnnnnnnnnnnnnnnnnnnnnnnnnnnnnnnnnnnnnnnnnnnnnnnnnnnnnnnnnnnnnnnnnnnnnnnnnnnnnnnnnnnnnnnnnnnnnnnnnnnnnnnnnnnnnnnnnnnnnnnnnnnnnnnnnnnnnnnnnnnnnnnnnnnnnnnnnnnnnnnnnnnnnnnnnnnnnnnnnnnnnnnnnnnnnnnnnnnnnnnnnnnnnnnnnnnnnnnnnnnnnnnnnnnnnnnnnnnnnnnnnnnnnnnnnnnnnnnnnnnnnnnnnnnnnnnnnnnnnnnnnnnnnnnnnnnnnnnnnnnnnnnnnnnnnnnnnnnnnnnnnnnnnnnnnnnnnnnnnnnnnnnnnnnnnnnnnnnnnnnnnnnnnnnnnnnnnnnnnnnnnnnnnnnnnnnnnnnnnnnnnnnnnnnnnnnnnnnnnnnnnnnnnnnnnnnnnnnnnnnnnnnnnnnnnnnnnnnnnnnnnnnnnnnnnnnnnnnnnnnnnnnnnnnnnnnnnnnnnnnnnnnnnnnnnnnnnnnnnnnnnnnnnnnnnnnnnnnnnnnnnnnnnnnnnnnnnnnnnnnnnnnnnnnnnnnnnnnnnnnnnnnnnnnnnnnnnnnnnnnnnnnnnnnnnnnnnnnnnnnnnnnnnnnnnnnnnnnnnnnnnnnnnnnnnnnnnnnnnnnnnnnnnnnnnnnnnnnnnnnnnnnnnnnnnnnnnnnnnnnnnnnnnnnnnnnnnnnnnnnnnnnnnnnnnnnnnnnnnnnnnnnnnnnnnnnnnnnnnnnnnnnnnnnnnnnnnnnnnnnnnnnnnnnnnnnnnnnnnnnnnnnnnnnnnnnnnnnnnnnnnnnnnnnnnnnnnnnnnnnnnnnnnnnnnnnnnnnnnnnnnnnnnnnnnnnnnnnnnnnnnnnnnnnnnnnnnnnnnnnnnnnnnnnnnnnnnnnnnnnnnnnnnnnnnnnnnnnnnnnnnnnnnnnnnnnnnnnnnnnnnnnnnnnnnnnnnnnnnnnnnnnnnnnnnnnnnnnnnnnnnnnnnnnnnnnnnnnnnnnnnnnnnnnnnnnnnnnnnnnnnnnnnnnnnnnnnnnnnnnnnnnnnnnnnnnnnnnnnnnnnnnnnnnnnnnnnnnnnnnnnnnnnnnnnnnnnnnnnnnnnnnnnnnnnnnnnnnnnnnnnnnnnnnnnnnnnnnnnnnnnnnnnnnnnnnnnnnnnnnnnnnnnnnnnnnnnnnnnnnnnnnnnnnnnnnnnnnnnnnnnnnnnnnnnnnnnnnnnnnnnnnnnnnnnnnnnnnnnnnnnnnnnnnnnnnnnnnnnnnnnnnnnnnnnnnnnnnnnnnnnnnnnnnnnnnnnnnnnnnnnnnnnnnnnnnnnnnnnnnnnnnnnnnnnnnnnnnnnnnnnnnnnnnnnnnnnnnnnnnnnnnnnnnnnnnnnnnnnnnnnnnnnnnnnnnnnnnnnnnnnnnnnnnnnnnnnnnnnnnnnnnnnnnnnnnnnnnnnnnnnnnnnnnnnnnnnnnnnnnnnnnnnnnnnnnnnnnnnnnnnnnnnnnnnnnnnnnnnnnnnnnnnnnnnnnnnnnnnnnnnnnnnnnnnnnnnnnnnnnnnnnnnnnnnnnnnnnnnnnnnnnnnnnnnnnnnnnnnnnnnnnnnnnnnnnnnnnnnnnnnnnnnnnnnnnnnnnnnnnnnnnnnnnnnnnnnnnnnnnnnnnnnnnnnnnnnnnnnnnnnnnnnnnnnnnnnnnnnnnnnnnnnnnnnnnnnnnnnnnnnnnnnnnnnnnnnnnnnnnnnnnnnnnnnnnnnnnnnnnnnnnnnnnnnnnnnnnnnnnnnnnnnnnnnnnnnnnnnnnnnnnnnnnnnnnnnnnnnnnnnnnnnnnnnnnnnnnnnnnnnnnnnnnnnnnnnnnnnnnnnnnnnnnnnnnnnnnnnnnnnnnnnnnnnnnnnnnnnnnnnnnnnnnnnnnnnnnnnnnnnnnnnnnnnnnnnnnnnnnnnnnnnnnnnnnnnnnnnnnnnnnnnnnnnnnnnnnnnnnnnnnnnnnnnnnnnnnnnnnnnnnnnnnnnnnnnnnnnnnnnnnnnnnnnnnnnnnnnnnnnnnnnnnnnnnnnnnnnnnnnnnnnnnnnnnnnnnnnnnnnnnnnnnnnnnnnnnnnnnnnnnnnnnnnnnnnnnnnnnnnnnnnnnnnnnnnnnnnnnnnnnnnnnnnnnnnnnnnnnnnnnnnnnnnnnnnnnnnnnnnnnnnnnnnnnnnnnnnnnnnnnnnnnnnnnnnnnnnnnnnnnnnnnnnnnnnnnnnnnnnnnnnnnnnnnnnnnnnnnnnnnnnnnnnnnnnnnnnnnnnnnnnnnnnnnnnnnnnnnnnnnnnnnnnnnnnnnnnnnnnnnnnnnnnnnnnnnnnnnnnnnnnnnnnnnnnnnnnnnnnnnnnnnnnnnnnnnnnnnnnnnnnnnnnnnnnnnnnnnnnnnnnnnnnnnnnnnnnnnnnnnnnnnnnnnnnnnnnnnnnnnnnnnnnnnnnnnnnnnnnnnnnnnnnnnnnnnnnnnnnnnnnnnnnnnnnnnnnnnnnnnnnnnnnnnnnnnnnnnnnnnnnnnnnnnnnnnnnnnnnnnnnnnnnnnnnnnnnnnnnnnnnnnnnnnnnnnnnnnnnnnnnnnnnnnnnnnnnnnnnnnnnnnnnnnnnnnnnnnnnnnnnnnnnnnnnnnnnnnnnnnnnnnnnnnnnnnnnnnnnnnnnnnnnnnnnnnnnnnnnnnnnnnnnnnnnnnnnnnnnnnnnnnnnnnnnnnnnnnnnnnnnnnnnnnnnnnnnnnnnnnnnnnnnnnnnnnnnnnnnnnnnnnnnnnnnnnnnnnnnnnnnnnnnnnnnnnnnnnnnnnnnnnnnnnnnnnnnnnnnnnnnnnnnnnnnnnnnnnnnnnnnnnnnnnnnnnnnnnnnnnnnnnnnnnnnnnnnnnnnnnnnnnnnnnnnnnnnnnnnnnnnnnnnnnnnnnnnnnnnnnnnnnnnnnnnnnnnnnnnnnnnnnnnnnnnnnnnnnnnnnnnnnnnnnnnnnnnnnnnnnnnnnnnnnnnnnnnnnnnnnnnnnnnnnnnnnnnnnnnnnnnnnnnnnnnnnnnnnnnnnnnnnnnnnnnnnnnnnnnnnnnnnnnnnnnnnnnnnnnnnnnnnnnnnnnnnnnnnnnnnnnnnnnnnnnnnnnnnnnnnnnnnnnnnnnnnnnnnnnnnnnnnnnnnnnnnnnnnnnnnnnnnnnnnnnnnnnnnnnnnnnnnnnnnnnnnnnnnnnnnnnnnnnnnnnnnnnnnnnnnnnnnnnnnnnnnnnnnnnnnnnnnnnnnnnnnnnnnnnnnnnnnnnnnnnnnnnnnnnnnnnnnnnnnnnnnnnnnnnnnnnnnnnnnnnnnnnnnnnnnnnnnnnnnnnnnnnnnnnnnnnnnnnnnnnnnnnnnnnnnnnnnnnnnnnnnnnnnnnnnnnnnnnnnnnnnnnnnnnnnnnnnnnnnnnnnnnnnnnnnnnnnnnnnnnnnnnnnnnnnnnnnnnnnnnnnnnnnnnnnnnnnnnnnnnnnnnnnnnnnnnnnnnnnnnnnnnnnnnnnnnnnnnnnnnnnnnnnnnnnnnnnnnnnnnnnnnnnnnnnnnnnnnnnnnnnnnnnnnnnnnnnnnnnnnnnnnnnnnnnnnnnnnnnnnnnnnnnnnnnnnnnnnnnnnnnnnnnnnnnnnnnnnnnnnnnnnnnnnnnnnnnnnnnnnnnnnnnnnnnnnnnnnnnnnnnnnnnnnnnnnnnnnnnnnnnnnnnnnnnnnnnnnnnnnnnnnnnnnnnnnnnnnnnnnnnnnnnnnnnnnnnnnnnnnnnnnnnnnnnnnnnnnnnnnnnnnnnnnnnnnnnnnnnnnnnnnnnnnnnnnnnnnnnnnnnnnnnnnnnnnnnnnnnnnnnnnnnnnnnnnnnnnnnnnnnnnnnnnnnnnnnnnnnnnnnnnnnnnnnnnnnnnnnnnnnnnnnnnnnnnnnnnnnnnnnnnnnnnnnnnnnnnnnnnnnnnnnnnnnnnnnnnnnnnnnnnnnnnnnnnnnnnnnnnnnnnnnnnnnnnnnnnnnnnnnnnnnnnnnnnnnnnnnnnnnnnnnnnnnnnnnnnnnnnnnnnnnnnnnnnnnnnnnnnnnnnnnnnnnnnnnnnnnnnnnnnnnnnnnnnnnnnnnnnnnnnnnnnnnnnnnnnnnnnnnnnnnnnnnnnnnnnnnnnnnnnnnnnnnnnnnnnnnnnnnnnnnnnnnnnnnnnnnnnnnnnnnnnnnnnnnnnnnnnnnnnnnnnnnnnnnnnnnnnnnnnnnnnnnnnnnnnnnnnnnnnnnnnnnnnnnnnnnnnnnnnnnnnnnnnnnnnnnnnnnnnnnnnnnnnnnnnnnnnnnnnnnnnnnnnnnnnnnnnnnnnnnnnnnnnnnnnnnnnnnnnnnnnnnnnnnnnnnnnnnnnnnnnnnnnnnnnnnnnnnnnnnnnnnnnnnnnnnnnnnnnnnnnnnnnnnnnnnnnnnnnnnnnnnnnnnnnnnnnnnnnnnnnnnnnnnnnnnnnnnnnnnnnnnnnnnnnnnnnnnnnnnnnnnnnnnnnnnnnnnnnnnnnnnnnnnnnnnnnnnnnnnnnnnnnnnnnnnnnnnnnnnnnnnnnnnnnnnnnnnnnnnnnnnnnnnnnnnnnnnnnnnnnnnnnnnnnnnnnnnnnnnnnnnnnnnnnnnnnnnnnnnnnnnnnnnnnnnnnnnnnnnnnnnnnnnnnnnnnnnnnnnnnnnnnnnnnnnnnnnnnnnnnnnnnnnnnnnnnnnnnnnnnnnnnnnnnnnnnnnnnnnnnnnnnnnnnnnnnnnnnnnnnnnnnnnnnnnnnnnnnnnnnnnnnnnnnnnnnnnnnnnnnnnnnnnnnnnnnnnnnnnnnnnnnnnnnnnnnnnnnnnnnnnnnnnnnnnnnnnnnnnnnnnnnnnnnnnnnnnnnnnnnnnnnnnnnnnnnnnnnnnnnnnnnnnnnnnnnnnnnnnnnnnnnnnnnnnnnnnnnnnnnnnnnnnnnnnnnnnnnnnnnnnnnnnnnnnnnnnnnnnnnnnnnnnnnnnnnnnnnnnnnnnnnnnnnnnnnnnnnnnnnnnnnnnnnnnnnnnnnnnnnnnnnnnnnnnnnnnnnnnnnnnnnnnnnnnnnnnnnnnnnnnnnnnnnnnnnnnnnnnnnnnnnnnnnnnnnnnnnnnnnnnnnnnnnnnnnnnnnnnnnnnnnnnnnnnnnnnnnnnnnnnnnnnnnnnnnnnnnnnnnnnnnnnnnnnnnnnnnnnnnnnnnnnnnnnnnnnnnnnnnnnnnnnnnnnnnnnnnnnnnnnnnnnnnnnnnnnnnnnnnnnnnnnnnnnnnnnnnnnnnnnnnnnnnnnnnnnnnnnnnnnnnnnnnnnnnnnnnnnnnnnnnnnnnnnnnnnnnnnnnnnnnnnnnnnnnnnnnnnnnnnnnnnnnnnnnnnnnnnnnnnnnnnnnnnnnnnnnnnnnnnnnnnnnnnnnnnnnnnnnnnnnnnnnnnnnnnnnnnnnnnnnnnnnnnnnnnnnnnnnnnnnnnnnnnnnnnnnnnnnnnnnnnnnnnnnnnnnnnnnnnnnnnnnnnnnnnnnnnnnnnnnnnnnnnnnnnnnnnnnnnnnnnnnnnnnnnnnnnnnnnnnnnnnnnnnnnnnnnnnnnnnnnnnnnnnnnnnnnnnnnnnnnnnnnnnnnnnnnnnnnnnnnnnnnnnnnnnnnnnnnnnnnnnnnnnnnnnnnnnnnnnnnnnnnnnnnnnnnnnnnnnnnnnnnnnnnnnnnnnnnnnnnnnnnnnnnnnnnnnnnnnnnnnnnnnnnnnnnnnnnnnnnnnnnnnnnnnnnnnnnnnnnnnnnnnnnnnnnnnnnnnnnnnnnnnnnnnnnnnnnnnnnnnnnnnnnnnnnnnnnnnnnnnnnnnnnnnnnnnnnnnnnnnnnnnnnnnnnnnnnnnnnnnnnnnnnnnnnnnnnnnnnnnnnnnnnnnnnnnnnnnnnnnnnnnnnnnnnnnnnnnnnnnnnnnnnnnnnnnnnnnnnnnnnnnnnnnnnnnnnnnnnnnnnnnnnnnnnnnnnnnnnnnnnnnnnnnnnnnnnnnnnnnnnnnnnnnnnnnnnnnnnnnnnnnnnnnnnnnnnnnnnnnnnnnnnnnnnnnnnnnnnnnnnnnnnnnnnnnnnnnnnnnnnnnnnnnnnnnnnnnnnnnnnnnnnnnnnnnnnnnnnnnnnnnnnnnnnnnnnnnnnnnnnnnnnnnnnnnnnnnnnnnnnnnnnnnnnnnnnnnnnnnnnnnnnnnnnnnnnnnnnnnnnnnnnnnnnnnnnnnnnnnnnnnnnnnnnnnnnnnnnnnnnnnnnnnnnnnnnnnnnnnnnnnnnnnnnnnnnnnnnnnnnnnnnnnnnnnnnnnnnnnnnnnnnnnnnnnnnnnnnnnnnnnnnnnnnnnnnnnnnnnnnnnnnnnnnnnnnnnnnnnnnnnnnnnnnnnnnnnnnnnnnnnnnnnnnnnnnnnnnnnnnnnnnnnnnnnnnnnnnnnnnnnnnnnnnnnnnnnnnnnnnnnnnnnnnnnnnnnnnnnnnnnnnnnnnnnnnnnnnnnnnnnnnnnnnnnnnnnnnnnnnnnnnnnnnnnnnnnnnnnnnnnnnnnnnnnnnnnnnnnnnnnnnnnnnnnnnnnnnnnnnnnnnnnnnnnnnnnnnnnnnnnnnnnnnnnnnnnnnnnnnnnnnnnnnnnnnnnnnnnnnnnnnnnnnnnnnnnnnnnnnnnnnnnnnnnnnnnnnnnnnnnnnnnnnnnnnnnnnnnnnnnnnnnnnnnnnnnnnnnnnnnnnnnnnnnnnnnnnnnnnnnnnnnnnnnnnnnnnnnnnnnnnnnnnnnnnnnnnnnnnnnnnnnnnnnnnnnnnnnnnnnnnnnnnnnnnnnnnnnnnnnnnnnnnnnnnnnnnnnnnnnnnnnnnnnnnnnnnnnnnnnnnnnnnnnnnnnnnnnnnnnnnnnnnnnnnnnnnnnnnnnnnnnnnnnnnnnnnnnnnnnnnnnnnnnnnnnnnnnnnnnnnnnnnnnnnnnnnnnnnnnnnnnnnnnnnnnnnnnnnnnnnnnnnnnnnnnnnnnnnnnnnnnnnnnnnnnnnnnnnnnnnnnnnnnnnnnnnnnnnnnnnnnnnnnnnnnnnnnnnnnnnnnnnnnnnnnnnnnnnnnnnnnnnnnnnnnnnnnnnnnnnnnnnnnnnnnnnnnnnnnnnnnnnnnnnnnnnnnnnnnnnnnnnnnnnnnnnnnnnnnnnnnnnnnnnnnnnnnnnnnnnnnnnnnnnnnnnnnnnnnnnnnnnnnnnnnnnnnnnnnnnnnnnnnnnnnnnnnnnnnnnnnnnnnnnnnnnnnnnnnnnnnnnnnnnnnnnnnnnnnnnnnnnnnnnnnnnnnnnnnnnnnnnnnnnnnnnnnnnnnnnnnnnnnnnnnnnnnnnnnnnnnnnnnnnnnnnnnnnnnnnnnnnnnnnnnnnnnnnnnnnnnnnnnnnnnnnnnnnnnnnnnnnnnnnnnnnnnnnnnnnnnnnnnnnnnnnnnnnnnnnnnnnnnnnnnnnnnnnnnnnnnnnnnnnnnnnnnnnnnnnnnnnnnnnnnnnnnnnnnnnnnnnnnnnnnnnnnnnnnnnnnnnnnnnnnnnnnnnnnnnnnnnnnnnnnnnnnnnnnnnnnnnnnnnnnnnnnnnnnnnnnnnnnnnnnnnnnnnnnnnnnnnnnnnnnnnnnnnnnnnnnnnnnnnnnnnnnnnnnnnnnnnnnnnnnnnnnnnnnnnnnnnnnnnnnnnnnnnnnnnnnnnnnnnnnnnnnnnnnnnnnnnnnnnnnnnnnnnnnnnnnnnnnnnnnnnnnnnnnnnnnnnnnnnnnnnnnnnnnnnnnnnnnnnnnnnnnnnnnnnnnnnnnnnnnnnnnnnnnnnnnnnnnnnnnnnnnnnnnnnnnnnnnnnnnnnnnnnnnnnnnnnnnnnnnnnnnnnnnnnnnnnnnnnnnnnnnnnnnnnnnnnnnnnnnnnnnnnnnnnnnnnnnnnnnnnnnnnnnnnnnnnnnnnnnnnnnnnnnnnnnnnnnnnnnnnnnnnnnnnnnnnnnnnnnnnnnnnnnnnnnnnnnnnnnnnnnnnnnnnnnnnnnnnnnnnnnnnnnnnnnnnnnnnnnnnnnnnnnnnnnnnnnnnnnnnnnnnnnnnnnnnnnnnnnnnnnnnnnnnnnnnnnnnnnnnnnnnnnnnnnnnnnnnnnnnnnnnnnnnnnnnnnnnnnnnnnnnnnnnnnnnnnnnnnnnnnnnnnnnnnnnnnnnnnnnnnnnnnnnnnnnnnnnnnnnnnnnnnnnnnnnnnnnnnnnnnnnnnnnnnnnnnnnnnnnnnnnnnnnnnnnnnnnnnnnnnnnnnnnnnnnnnnnnnnnnnnnnnnnnnnnnnnnnnnnnnnnnnnnnnnnnnnnnnnnnnnnnnnnnnnnnnnnnnnnnnnnnnnnnnnnnnnnnnnnnnnnnnnnnnnnnnnnnnnnnnnnnnnnnnnnnnnnnnnnnnnnnnnnnnnnnnnnnnnnnnnnnnnnnnnnnnnnnnnnnnnnnnnnnnnnnnnnnnnnnnnnnnnnnnnnnnnnnnnnnnnnnnnnnnnnnnnnnnnnnnnnnnnnnnnnnnnnnnnnnnnnnnnnnnnnnnnnnnnnnnnnnnnnnnnnnnnnnnnnnnnnnnnnnnnnnnnnnnnnnnnnnnnnnnnnnnnnnnnnnnnnnnnnnnnnnnnnnnnnnnnnnnnnnnnnnnnnnnnnnnnnnnnnnnnnnnnnnnnnnnnnnnnnnnnnnnnnnnnnnnnnnnnnnnnnnnnnnnnnnnnnnnnnnnnnnnnnnnnnnnnnnnnnnnnnnnnnnnnnnnnnnnnnnnnnnnnnnnnnnnnnnnnnnnnnnnnnnnnnnnnnnnnnnnnnnnnnnnnnnnnnnnnnnnnnnnnnnnnnnnnnnnnnnnnnnnnnnnnnnnnnnnnnnnnnnnnnnnnnnnnnnnnnnnnnnnnnnnnnnnnnnnnnnnnnnnnnnnnnnnnnnnnnnnnnnnnnnnnnnnnnnnnnnnnnnnnnnnnnnnnnnnnnnnnnnnnnnnnnnnnnnnnnnnnnnnnnnnnnnnnnnnnnnnnnnnnnnnnnnnnnnnnnnnnnnnnnnnnnnnnnnnnnnnnnnnnnnnnnnnnnnnnnnnnnnnnnnnnnnnnnnnnnnnnnnnnnnnnnnnnnnnnnnnnnnnnnnnnnnnnnnnnnnnnnnnnnnnnnnnnnnnnnnnnnnnnnnnnnnnnnnnnnnnnnnnnnnnnnnnnnnnnnnnnnnnnnnnnnnnnnnnnnnnnnnnnnnnnnnnnnnnnnnnnnnnnnnnnnnnnnnnnnnnnnnnnnnnnnnnnnnnnnnnnnnnnnnnnnnnnnnnnnnnnnnnnnnnnnnnnnnnnnnnnnnnnnnnnnnnnnnnnnnnnnnnnnnnnnnnnnnnnnnnnnnnnnnnnnnnnnnnnnnnnnnnnnnnnnnnnnnnnnnnnnnnnnnnnnnnnnnnnnnnnnnnnnnnnnnnnnnnnnnnnnnnnnnnnnnnnnnnnnnnnnnnnnnnnnnnnnnnnnnnnnnnnnnnnnnnnnnnnnnnnnnnnnnnnnnnnnnnnnnnnnnnnnnnnnnnnnnnnnnnnnnnnnnnnnnnnnnnnnnnnnnnnnnnnnnnnnnnnnnnnnnnnnnnnnnnnnnnnnnnnnnnnnnnnnnnnnnnnnnnnnnnnnnnnnnnnnnnnnnnnnnnnnnnnnnnnnnnnnnnnnnnnnnnnnnnnnnnnnnnnnnnnnnnnnnnnnnnnnnnnnnnnnnnnnnnnnnnnnnnnnnnnnnnnnnnnnnnnnnnnnnnnnnnnnnnnnnnnnnnnnnnnnnnnnnnnnnnnnnnnnnnnnnnnnnnnnnnnnnnnnnnnnnnnnnnnnnnnnnnnnnnnnnnnnnnnnnnnnnnnnnnnnnnnnnnnnnnnnnnnnnnnnnnnnnnnnnnnnnnnnnnnnnnnnnnnnnnnnnnnnnnnnnnnnnnnnnnnnnnnnnnnnnnnnnnnnnnnnnnnnnnnnnnnnnnnnnnnnnnnnnnnnnnnnnnnnnnnnnnnnnnnnnnnnnnnnnnnnnnnnnnnnnnnnnnnnnnnnnnnnnnnnnnnnnnnnnnnnnnnnnnnnnnnnnnnnnnnnnnnnnnnnnnnnnnnnnnnnnnnnnnnnnnnnnnnnnnnnnnnnnnnnnnnnnnnnnnnnnnnnnnnnnnnnnnnnnnnnnnnnnnnnnnnnnnnnnnnnnnnnnnnnnnnnnnnnnnnnnnnnnnnnnnnnnnnnnnnnnnnnnnnnnnnnnnnnnnnnnnnnnnnnnnnnnnnnnnnnnnnnnnnnnnnnnnnnnnnnnnnnnnnnnnnnnnnnnnnnnnnnnnnnnnnnnnnnnnnnnnnnnnnnnnnnnnnnnnnnnnnnnnnnnnnnnnnnnnnnnnnnnnnnnnnnnnnnnnnnnnnnnnnnnnnnnnnnnnnnnnnnnnnnnnnnnnnnnnnnnnnnnnnnnnnnnnnnnnnnnnnnnnnnnnnnnnnnnnnnnnnnnnnnnnnnnnnnnnnnnnnnnnnnnnnnnnnnnnnnnnnnnnnnnnnnnnnnnnnnnnnnnnnnnnnnnnnnnnnnnnnnnnnnnnnnnnnnnnnnnnnnnnnnnnnnnnnnnnnnnnnnnnnnnnnnnnnnnnnnnnnnnnnnnnnnnnnnnnnnnnnnnnnnnnnnnnnnnnnnnnnnnnnnnnnnnnnnnnnnnnnnnnnnnnnnnnnnnnnnnnnnnnnnnnnnnnnnnnnnnnnnnnnnnnnnnnnnnnnnnnnnnnnnnnnnnnnnnnnnnnnnnnnnnnnnnnnnnnnnnnnnnnnnnnnnnnnnnnnnnnnnnnnnnnnnnnnnnnnnnnnnnnnnnnnnnnnnnnnnnnnnnnnnnnnnnnnnnnnnnnnnnnnnnnnnnnnnnnnnnnnnnnnnnnnnnnnnnnnnnnnnnnnnnnnnnnnnnnnnnnnnnnnnnnnnnnnnnnnnnnnnnnnnnnnnnnnnnnnnnnnnnnnnnnnnnnnnnnnnnnnnnnnnnnnnnnnnnnnnnnnnnnnnnnnnnnnnnnnnnnnnnnnnnnnnnnnnnnnnnnnnnnnnnnnnnnnnnnnnnnnnnnnnnnnnnnnnnnnnnnnnnnnnnnnnnnnnnnnnnnnnnnnnnnnnnnnnnnnnnnnnnnnnnnnnnnnnnnnnnnnnnnnnnnnnnnnnnnnnnnnnnnnnnnnnnnnnnnnnnnnnnnnnnnnnnnnnnnnnnnnnnnnnnnnnnnnnnnnnnnnnnnnnnnnnnnnnnnnnnnnnnnnnnnnnnnnnnnnnnnnnnnnnnnnnnnnnnnnnnnnnnnnnnnnnnnnnnnnnnnnnnnnnnnnnnnnnnnnnnnnnnnnnnnnnnnnnnnnnnnnnnnnnnnnnnnnnnnnnnnnnnnnnnnnnnnnnnnnnnnnnnnnnnnnnnnnnnnnnnnnnnnnnnnnnnnnnnnnnnnnnnnnnnnnnnnnnnnnnnnnnnnnnnnnnnnnnnnnnnnnnnnnnnnnnnnnnnnnnnnnnnnnnnnnnnnnnnnnnnnnnnnnnnnnnnnnnnnnnnnnnnnnnnnnnnnnnnnnnnnnnnnnnnnnnnnnnnnnnnnnnnnnnnnnnnnnnnnnnnnnnnnnnnnnnnnnnnnnnnnnnnnnnnnnnnnnnnnnnnnnnnnnnnnnnnnnnnnnnnnnnnnnnnnnnnnnnnnnnnnnnnnnnnnnnnnnnnnnnnnnnnnnnnnnnnnnnnnnnnnnnnnnnnnnnnnnnnnnnnnnnnnnnnnnnnnnnnnnnnnnnnnnnnnnnnnnnnnnnnnnnnnnnnnnnnnnnnnnnnnnnnnnnnnnnnnnnnnnnnnnnnnnnnnnnnnnnnnnnnnnnnnnnnnnnnnnnnnnnnnnnnnnnnnnnnnnnnnnnnnnnnnnnnnnnnnnnnnnnnnnnnnnnnnnnnnnnnnnnnnnnnnnnnnnnnnnnnnnnnnnnnnnnnnnnnnnnnnnnnnnnnnnnnnnnnnnnnnnnnnnnnnnnnnnnnnnnnnnnnnnnnnnnnnnnnnnnnnnnnnnnnnnnnnnnnnnnnnnnnnnnnnnnnnnnnnnnnnnnnnnnnnnnnnnnnnnnnnnnnnnnnnnnnnnnnnnnnnnnnnnnnnnnnnnnnnnnnnnnnnnnnnnnnnnnnnnnnnnnnnnnnnnnnnnnnnnnnnnnnnnnnnnnnnnnnnnnnnnnnnnnnnnnnnnnnnnnnnnnnnnnnnnnnnnnnnnnnnnnnnnnnnnnnnnnnnnnnnnnnnnnnnnnnnnnnnnnnnnnnnnnnnnnnnnnnnnnnnnnnnnnnnnnnnnnnnnnnnnnnnnnnnnnnnnnnnnnnnnnnnnnnnnnnnnnnnnnnnnnnnnnnnnnnnnnnnnnnnnnnnnnnnnnnnnnnnnnnnnnnnnnnnnnnnnnnnnnnnnnnnnnnnnnnnnnnnnnnnnnnnnnnnnnnnnnnnnnnnnnnnnnnnnnnnnnnnnnnnnnnnnnnnnnnnnnnnnnnnnnnnnnnnnnnnnnnnnnnnnnnnnnnnnnnnnnnnnnnnnnnnnnnnnnnnnnnnnnnnnnnnnnnnnnnnnnnnnnnnnnnnnnnnnnnnnnnnnnnnnnnnnnnnnnnnnnnnnnnnnnnnnnnnnnnnnnnnnnnnnnnnnnnnnnnnnnnnnnnnnnnnnnnnnnnnnnnnnnnnnnnnnnnnnnnnnnnnnnnnnnnnnnnnnnnnnnnnnnnnnnnnnnnnnnnnnnnnnnnnnnnnnnnnnnnnnnnnnnnnnnnnnnnnnnnnnnnnnnnnnnnnnnnnnnnnnnnnnnnnnnnnnnnnnnnnnnnnnnnnnnnnnnnnnnnnnnnnnnnnnnnnnnnnnnnnnnnnnnnnnnnnnnnnnnnnnnnnnnnnnnnnnnnnnnnnnnnnnnnnnnnnnnnnnnnnnnnnnnnnnnnnnnnnnnnnnnnnnnnnnnnnnnnnnnnnnnnnnnnnnnnnnnnnnnnnnnnnnnnnnnnnnnnnnnnnnnnnnnnnnnnnnnnnnnnnnnnnnnnnnnnnnnnnnnnnnnnnnnnnnnnnnnnnnnnnnnnnnnnnnnnnnnnnnnnnnnnnnnnnnnnnnnnnnnnnnnnnnnnnnnnnnnnnnnnnnnnnnnnnnnnnnnnnnnnnnnnnnnnnnnnnnnnnnnnnnnnnnnnnnnnnnnnnnnnnnnnnnnnnnnnnnnnnnnnnnnnnnnnnnnnnnnnnnnnnnnnnnnnnnnnnnnnnnnnnnnnnnnnnnnnnnnnnnnnnnnnnnnnnnnnnnnnnnnnnnnnnnnnnnnnnnnnnnnnnnnnnnnnnnnnnnnnnnnnnnnnnnnnnnnnnnnnnnnnnnnnnnnnnnnnnnnnnnnnnnnnnnnnnnnnnnnnnnnnnnnnnnnnnnnnnnnnnnnnnnnnnnnnnnnnnnnnnnnnnnnnnnnnnnnnnnnnnnnnnnnnnnnnnnnnnnnnnnnnnnnnnnnnnnnnnnnnnnnnnnnnnnnnnnnnnnnnnnnnnnnnnnnnnnnnnnnnnnnnnnnnnnnnnnnnnnnnnnnnnnnnnnnnnnnnnnnnnnnnnnnnnnnnnnnnnnnnnnnnnnnnnnnnnnnnnnnnnnnnnnnnnnnnnnnnnnnnnnnnnnnnnnnnnnnnnnnnnnnnnnnnnnnnnnnnnnnnnnnnnnnnnnnnnnnnnnnnnnnnnnnnnnnnnnnnnnnnnnnnnnnnnnnnnnnnnnnnnnnnnnnnnnnnnnnnnnnnnnnnnnnnnnnnnnnnnnnnnnnnnnnnnnnnnnnnnnnnnnnnnnnnnnnnnnnnnnnnnnnnnnnnnnnnnnnnnnnnnnnnnnnnnnnnnnnnnnnnnnnnnnnnnnnnnnnnnnnnnnnnnnnnnnnnnnnnnnnnnnnnnnnnnnnnnnnnnnnnnnnnnnnnnnnnnnnnnnnnnnnnnnnnnnnnnnnnnnnnnnnnnnnnnnnnnnnnnnnnnnnnnnnnnnnnnnnnnnnnnnnnnnnnnnnnnnnnnnnnnnnnnnnnnnnnnnnnnnnnnnnnnnnnnnnnnnnnnnnnnnnnnnnnnnnnnnnnnnnnnnnnnnnnnnnnnnnnnnnnnnnnnnnnnnnnnnnnnnnnnnnnnnnnnnnnnnnnnnnnnnnnnnnnnnnnnnnnnnnnnnnnnnnnnnnnnnnnnnnnnnnnnnnnnnnnnnnnnnnnnnnnnnnnnnnnnnnnnnnnnnnnnnnnnnnnnnnnnnnnnnnnnnnnnnnnnnnnnnnnnnnnnnnnnnnnnnnnnnnnnnnnnnnnnnnnnnnnnnnnnnnnnnnnnnnnnnnnnnnnnnnnnnnnnnnnnnnnnnnnnnnnnnnnnnnnnnnnnnnnnnnnnnnnnnnnnnnnnnnnnnnnnnnnnnnnnnnnnnnnnnnnnnnnnnnnnnnnnnnnnnnnnnnnnnnnnnnnnnnnnnnnnnnnnnnnnnnnnnnnnnnnnnnnnnnnnnnnnnnnnnnnnnnnnnnnnnnnnnnnnnnnnnnnnnnnnnnnnnnnnnnnnnnnnnnnnnnnnnnnnnnnnnnnnnnnnnnnnnnnnnnnnnnnnnnnnnnnnnnnnnnnnnnnnnnnnnnnnnnnnnnnnnnnnnnnnnnnnnnnnnnnnnnnnnnnnnnnnnnnnnnnnnnnnnnnnnnnnnnnnnnnnnnnnnnnnnnnnnnnnnnnnnnnnnnnnnnnnnnnnnnnnnnnnnnnnnnnnnnnnnnnnnnnnnnnnnnnnnnnnnnnnnnnnnnnnnnnnnnnnnnnnnnnnnnnnnnnnnnnnnnnnnnnnnnnnnnnnnnnnnnnnnnnnnnnnnnnnnnnnnnnnnnnnnnnnnnnnnnnnnnnnnnnnnnnnnnnnnnnnnnnnnnnnnnnnnnnnnnnnnnnnnnnnnnnnnnnnnnnnnnnnnnnnnnnnnnnnnnnnnnnnnnnnnnnnnnnnnnnnnnnnnnnnnnnnnnnnnnnnnnnnnnnnnnnnnnnnnnnnnnnnnnnnnnnnnnnnnnnnnnnnnnnnnnnnnnnnnnnnnnnnnnnnnnnnnnnnnnnnnnnnnnnnnnnnnnnnnnnnnnnnnnnnnnnnnnnnnnnnnnnnnnnnnnnnnnnnnnnnnnnnnnnnnnnnnnnnnnnnnnnnnnnnnnnnnnnnnnnnnnnnnnnnnnnnnnnnnnnnnnnnnnnnnnnnnnnnnnnnnnnnnnnnnnnnnnnnnnnnnnnnnnnnnnnnnnnnnnnnnnnnnnnnnnnnnnnnnnnnnnnnnnnnnnnnnnnnnnnnnnnnnnnnnnnnnnnnnnnnnnnnnnnnnnnnnnnnnnnnnnnnnnnnnnnnnnnnnnnnnnnnnnnnnnnnnnnnnnnnnnnnnnnnnnnnnnnnnnnnnnnnnnnnnnnnnnnnnnnnnnnnnnnnnnnnnnnnnnnnnnnnnnnnnnnnnnnnnnnnnnnnnnnnnnnnnnnnnnnnnnnnnnnnnnnnnnnnnnnnnnnnnnnnnnnnnnnnnnnnnnnnnnnnnnnnnnnnnnnnnnnnnnnnnnnnnnnnnnnnnnnnnnnnnnnnnnnnnnnnnnnnnnnnnnnnnnnnnnnnnnnnnnnnnnnnnnnnnnnnnnnnnnnnnnnnnnnnnnnnnnnnnnnnnnnnnnnnnnnnnnnnnnnnnnnnnnnnnnnnnnnnnnnnnnnnnnnnnnnnnnnnnnnnnnnnnnnnnnnnnnnnnnnnnnnnnnnnnnnnnnnnnnnnnnnnnnnnnnnnnnnnnnnnnnnnnnnnnnnnnnnnnnnnnnnnnnnnnnnnnnnnnnnnnnnnnnnnnnnnnnnnnnnnnnnnnnnnnnnnnnnnnnnnnnnnnnnnnnnnnnnnnnnnnnnnnnnnnnnnnnnnnnnnnnnnnnnnnnnnnnnnnnnnnnnnnnnnnnnnnnnnnnnnnnnnnnnnnnnnnnnnnnnnnnnnnnnnnnnnnnnnnnnnnnnnnnnnnnnnnnnnnnnnnnnnnnnnnnnnnnnnnnnnnnnnnnnnnnnnnnnnnnnnnnnnnnnnnnnnnnnnnnnnnnnnnnnnnnnnnnnnnnnnnnnnnnnnnnnnnnnnnnnnnnnnnnnnnnnnnnnnnnnnnnnnnnnnnnnnnnnnnnnnnnnnnnnnnnnnnnnnnnnnnnnnnnnnnnnnnnnnnnnnnnnnnnnnnnnnnnnnnnnnnnnnnnnnnnnnnnnnnnnnnnnnnnnnnnnnnnnnnnnnnnnnnnnnnnnnnnnnnnnnnnnnnnnnnnnnnnnnnnnnnnnnnnnnnnnnnnnnnnnnnnnnnnnnnnnnnnnnnnnnnnnnnnnnnnnnnnnnnnnnnnnnnnnnnnnnnnnnnnnnnnnnnnnnnnnnnnnnnnnnnnnnnnnnnnnnnnnnnnnnnnnnnnnnnnnnnnnnnnnnnnnnnnnnnnnnnnnnnnnnnnnnnnnnnnnnnnnnnnnnnnnnnnnnnnnnnnnnnnnnnnnnnnnnnnnnnnnnnnnnnnnnnnnnnnnnnnnnnnnnnnnnnnnnnnnnnnnnnnnnnnnnnnnnnnnnnnnnnnnnnnnnnnnnnnnnnnnnnnnnnnnnnnnnnnnnnnnnnnnnnnnnnnnnnnnnnnnnnnnnnnnnnnnnnnnnnnnnnnnnnnnnnnnnnnnnnnnnnnnnnnnnnnnnnnnnnnnnnnnnnnnnnnnnnnnnnnnnnnnnnnnnnnnnnnnnnnnnnnnnnnnnnnnnnnnnnnnnnnnnnnnnnnnnnnnnnnnnnnnnnnnnnnnnnnnnnnnnnnnnnnnnnnnnnnnnnnnnnnnnnnnnnnnnnnnnnnnnnnnnnnnnnnnnnnnnnnnnnnnnnnnnnnnnnnnnnnnnnnnnnnnnnnnnnnnnnnnnnnnnnnnnnnnnnnnnnnnnnnnnnnnnnnnnnnnnnnnnnnnnnnnnnnnnnnnnnnnnnnnnnnnnnnnnnnnnnnnnnnnnnnnnnnnnnnnnnnnnnnnnnnnnnnnnnnnnnnnnnnnnnnnnnnnnnnnnnnnnnnnnnnnnnnnnnnnnnnnnnnnnnnnnnnnnnnnnnnnnnnnnnnnnnnnnnnnnnnnnnnnnnnnnnnnnnnnnnnnnnnnnnnnnnnnnnnnnnnnnnnnnnnnnnnnnnnnnnnnnnnnnnnnnnnnnnnnnnnnnnnnnnnnnnnnnnnnnnnnnnnnnnnnnnnnnnnnnnnnnnnnnnnnnnnnnnnnnnnnnnnnnnnnnnnnnnnnnnnnnnnnnnnnnnnnnnnnnnnnnnnnnnnnnnnnnnnnnnnnnnnnnnnnnnnnnnnnnnnnnnnnnnnnnnnnnnnnnnnnnnnnnnnnnnnnnnnnnnnnnnnnnnnnnnnnnnnnnnnnnnnnnnnnnnnnnnnnnnnnnnnnnnnnnnnnnnnnnnnnnnnnnnnnnnnnnnnnnnnnnnnnnnnnnnnnnnnnnnnnnnnnnnnnnnnnnnnnnnnnnnnnnnnnnnnnnnnnnnnnnnnnnnnnnnnnnnnnnnnnnnnnnnnnnnnnnnnnnnnnnnnnnnnnnnnnnnnnnnnnnnnnnnnnnnnnnnnnnnnnnnnnnnnnnnnnnnnnnnnnnnnnnnnnnnnnnnnnnnnnnnnnnnnnnnnnnnnnnnnnnnnnnnnnnnnnnnnnnnnnnnnnnnnnnnnnnnnnnnnnnnnnnnnnnnnnnnnnnnnnnnnnnnnnnnnnnnnnnnnnnnnnnnnnnnnnnnnnnnnnnnnnnnnnnnnnnnnnnnnnnnnnnnnnnnnnnnnnnnnnnnnnnnnnnnnnnnnnnnnnnnnnnnnnnnnnnnnnnnnnnnnnnnnnnnnnnnnnnnnnnnnnnnnnnnnnnnnnnnnnnnnnnnnnnnnnnnnnnnnnnnnnnnnnnnnnnnnnnnnnnnnnnnnnnnnnnnnnnnnnnnnnnnnnnnnnnnnnnnnnnnnnnnnnnnnnnnnnnnnnnnnnnnnnnnnnnnnnnnnnnnnnnnnnnnnnnnnnnnnnnnnnnnnnnnnnnnnnnnnnnnnnnnnnnnnnnnnnnnnnnnnnnnnnnnnnnnnnnnnnnnnnnnnnnnnnnnnnnnnnnnnnnnnnnnnnnnnnnnnnnnnnnnnnnnnnnnnnnnnnnnnnnnnnnnnnnnnnnnnnnnnnnnnnnnnnnnnnnnnnnnnnnnnnnnnnnnnnnnnnnnnnnnnnnnnnnnnnnnnnnnnnnnnnnnnnnnnnnnnnnnnnnnnnnnnnnnnnnnnnnnnnnnnnnnnnnnnnnnnnnnnnnnnnnnnnnnnnnnnnnnnnnnnnnnnnnnnnnnnnnnnnnnnnnnnnnnnnnnnnnnnnnnnnnnnnnnnnnnnnnnnnnnnnnnnnnnnnnnnnnnnnnnnnnnnnnnnnnnnnnnnnnnnnnnnnnnnnnnnnnnnnnnnnnnnnnnnnnnnnnnnnnnnnnnnnnnnnnnnnnnnnnnnnnnnnnnnnnnnnnnnnnnnnnnnnnnnnnnnnnnnnnnnnnnnnnnnnnnnnnnnnnnnnnnnnnnnnnnnnnnnnnnnnnnnnnnnnnnnnnnnnnnnnnnnnnnnnnnnnnnnnnnnnnnnnnnnnnnnnnnnnnnnnnnnnnnnnnnnnnnnnnnnnnnnnnnnnnnnnnnnnnnnnnnnnnnnnnnnnnnnnnnnnnnnnnnnnnnnnnnnnnnnnnnnnnnnnnnnnnnnnnnnnnnnnnnnnnnnnnnnnnnnnnnnnnnnnnnnnnnnnnnnnnnnnnnnnnnnnnnnnnnnnnnnnnnnnnnnnnnnnnnnnnnnnnnnnnnnnnnnnnnnnnnnnnnnnnnnnnnnnnnnnnnnnnnnnnnnnnnnnnnnnnnnnnnnnnnnnnnnnnnnnnnnnnnnnnnnnnnnnnnnnnnnnnnnnnnnnnnnnnnnnnnnnnnnnnnnnnnnnnnnnnnnnnnnnnnnnnnnnnnnnnnnnnnnnnnnnnnnnnnnnnnnnnnnnnnnnnnnnnnnnnnnnnnnnnnnnnnnnnnnnnnnnnnnnnnnnnnnnnnnnnnnnnnnnnnnnnnnnnnnnnnnnnnnnnnnnnnnnnnnnnnnnnnnnnnnnnnnnnnnnnnnnnnnnnnnnnnnnnnnnnnnnnnnnnnnnnnnnnnnnnnnnnnnnnnnnnnnnnnnnnnnnnnnnnnnnnnnnnnnnnnnnnnnnnnnnnnnnnnnnnnnnnnnnnnnnnnnnnnnnnnnnnnnnnnnnnnnnnnnnnnnnnnnnnnnnnnnnnnnnnnnnnnnnnnnnnnnnnnnnnnnnnnnnnnnnnnnnnnnnnnnnnnnnnnnnnnnnnnnnnnnnnnnnnnnnnnnnnnnnnnnnnnnnnnnnnnnnnnnnnnnnnnnnnnnnnnnnnnnnnnnnnnnnnnnnnnnnnnnnnnnnnnnnnnnnnnnnnnnnnnnnnnnnnnnnnnnnnnnnnnnnnnnnnnnnnnnnnnnnnnnnnnnnnnnnnnnnnnnnnnnnnnnnnnnnnnnnnnnnnnnnnnnnnnnnnnnnnnnnnnnnnnnnnnnnnnnnnnnnnnnnnnnnnnnnnnnnnnnnnnnnnnnnnnnnnnnnnnnnnnnnnnnnnnnnnnnnnnnnnnnnnnnnnnnnnnnnnnnnnnnnnnnnnnnnnnnnnnnnnnnnnnnnnnnnnnnnnnnnnnnnnnnnnnnnnnnnnnnnnnnnnnnnnnnnnnnnnnnnnnnnnnnnnnnnnnnnnnnnnnnnnnnnnnnnnnnnnnnnnnnnnnnnnnnnnnnnnnnnnnnnnnnnnnnnnnnnnnnnnnnnnnnnnnnnnnnnnnnnnnnnnnnnnnnnnnnnnnnnnnnnnnnnnnnnnnnnnnnnnnnnnnnnnnnnnnnnnnnnnnnnnnnnnnnnnnnnnnnnnnnnnnnnnnnnnnnnnnnnnnnnnnnnnnnnnnnnnnnnnnnnnnnnnnnnnnnnnnnnnnnnnnnnnnnnnnnnnnnnnnnnnnnnnnnnnnnnnnnnnnnnnnnnnnnnnnnnnnnnnnnnnnnnnnnnnnnnnnnnnnnnnnnnnnnnnnnnnnnnnnnnnnnnnnnnnnnnnnnnnnnnnnnnnnnnnnnnnnnnnnnnnnnnnnnnnnnnnnnnnnnnnnnnnnnnnnnnnnnnnnnnnnnnnnnnnnnnnnnnnnnnnnnnnnnnnnnnnnnnnnnnnnnnnnnnnnnnnnnnnnnnnnnnnnnnnnnnnnnnnnnnnnnnnnnnnnnnnnnnnnnnnnnnnnnnnnnnnnnnnnnnnnnnnnnnnnnnnnnnnnnnnnnnnnnnnnnnnnnnnnnnnnnnnnnnnnnnnnnnnnnnnnnnnnnnnnnnnnnnnnnnnnnnnnnnnnnnnnnnnnnnnnnnnnnnnnnnnnnnnnnnnnnnnnnnnnnnnnnnnnnnnnnnnnnnnnnnnnnnnnnnnnnnnnnnnnnnnnnnnnnnnnnnnnnnnnnnnnnnnnnnnnnnnnnnnnnnnnnnnnnnnnnnnnnnnnnnnnnnnnnnnnnnnnnnnnnnnnnnnnnnnnnnnnnnnnnnnnnnnnnnnnnnnnnnnnnnnnnnnnnnnnnnnnnnnnnnnnnnnnnnnnnnnnnnnnnnnnnnnnnnnnnnnnnnnnnnnnnnnnnnnnnnnnnnnnnnnnnnnnnnnnnnnnnnnnnnnnnnnnnnnnnnnnnnnnnnnnnnnnnnnnnnnnnnnnnnnnnnnnnnnnnnnnnnnnnnnnnnnnnnnnnnnnnnnnnnnnnnnnnnnnnnnnnnnnnnnnnnnnnnnnnnnnnnnnnnnnnnnnnnnnnnnnnnnnnnnnnnnnnnnnnnnnnnnnnnnnnnnnnnnnnnnnnnnnnnnnnnnnnnnnnnnnnnnnnnnnnnnnnnnnnnnnnnnnnnnnnnnnnnnnnnnnnnnnnnnnnnnnnnnnnnnnnnnnnnnnnnnnnnnnnnnnnnnnnnnnnnnnnnnnnnnnnnnnnnnnnnnnnnnnnnnnnnnnnnnnnnnnnnnnnnnnnnnnnnnnnnnnnnnnnnnnnnnnnnnnnnnnnnnnnnnnnnnnnnnnnnnnnnnnnnnnnnnnnnnnnnnnnnnnnnnnnnnnnnnnnnnnnnnnnnnnnnnnnnnnnnnnnnnnnnnnnnnnnnnnnnnnnnnnnnnnnnnnnnnnnnnnnnnnnnnnnnnnnnnnnnnnnnnnnnnnnnnnnnnnnnnnnnnnnnnnnnnnnnnnnnnnnnnnnnnnnnnnnnnnnnnnnnnnnnnnnnnnnnnnnnnnnnnnnnnnnnnnnnnnnnnnnnnnnnnnnnnnnnnnnnnnnnnnnnnnnnnnnnnnnnnnnnnnnnnnnnnnnnnnnnnnnnnnnnnnnnnnnnnnnnnnnnnnnnnnnnnnnnnnnnnnnnnnnnnnnnnnnnnnnnnnnnnnnnnnnnnnnnnnnnnnnnnnnnnnnnnnnnnnnnnnnnnnnnnnnnnnnnnnnnnnnnnnnnnnnnnnnnnnnnnnnnnnnnnnnnnnnnnnnnnnnnnnnnnnnnnnnnnnnnnnnnnnnnnnnnnnnnnnnnnnnnnnnnnnnnnnnnnnnnnnnnnnnnnnnnnnnnnnnnnnnnnnnnnnnnnnnnnnnnnnnnnnnnnnnnnnnnnnnnnnnnnnnnnnnnnnnnnnnnnnnnnnnnnnnnnnnnnnnnnnnnnnnnnnnnnnnnnnnnnnnnnnnnnnnnnnnnnnnnnnnnnnnnnnnnnnnnnnnnnnnnnnnnnnnnnnnnnnnnnnnnnnnnnnnnnnnnnnnnnnnnnnnnnnnnnnnnnnnnnnnnnnnnnnnnnnnnnnnnnnnnnnnnnnnnnnnnnnnnnnnnnnnnnnnnnnnnnnnnnnnnnnnnnnnnnnnnnnnnnnnnnnnnnnnnnnnnnnnnnnnnnnnnnnnnnnnnnnnnnnnnnnnnnnnnnnnnnnnnnnnnnnnnnnnnnnnnnnnnnnnnnnnnnnnnnnnnnnnnnnnnnnnnnnnnnnnnnnnnnnnnnnnnnnnnnnnnnnnnnnnnnnnnnnnnnnnnnnnnnnnnnnnnnnnnnnnnnnnnnnnnnnnnnnnnnnnnnnnnnnnnnnnnnnnnnnnnnnnnnnnnnnnnnnnnnnnnnnnnnnnnnnnnnnnnnnnnnnnnnnnnnnnnnnnnnnnnnnnnnnnnnnnnnnnnnnnnnnnnnnnnnnnnnnnnnnnnnnnnnnnnnnnnnnnnnnnnnnnnnnnnnnnnnnnnnnnnnnnnnnnnnnnnnnnnnnnnnnnnnnnnnnnnnnnnnnnnnnnnnnnnnnnnnnnnnnnnnnnnnnnnnnnnnnnnnnnnnnnnnnnnnnnnnnnnnnnnnnnnnnnnnnnnnnnnnnnnnnnnnnnnnnnnnnnnnnnnnnnnnnnnnnnnnnnnnnnnnnnnnnnnnnnnnnnnnnnnnnnnnnnnnnnnnnnnnnnnnnnnnnnnnnnnnnnnnnnnnnnnnnnnnnnnnnnnnnnnnnnnnnnnnnnnnnnnnnnnnnnnnnnnnnnnnnnnnnnnnnnnnnnnnnnnnnnnnnnnnnnnnnnnnnnnnnnnnnnnnnnnnnnnnnnnnnnnnnnnnnnnnnnnnnnnnnnnnnnnnnnnnnnnnnnnnnnnnnnnnnnnnnnnnnnnnnnnnnnnnnnnnnnnnnnnnnnnnnnnnnnnnnnnnnnnnnnnnnnnnnnnnnnnnnnnnnnnnnnnnnnnnnnnnnnnnnnnnnnnnnnnnnnnnnnnnnnnnnnnnnnnnnnnnnnnnnnnnnnnnnnnnnnnnnnnnnnnnnnnnnnnnnnnnnnnnnnnnnnnnnnnnnnnnnnnnnnnnnnnnnnnnnnnnnnnnnnnnnnnnnnnnnnnnnnnnnnnnnnnnnnnnnnnnnnnnnnnnnnnnnnnnnnnnnnnnnnnnnnnnnnnnnnnnnnnnnnnnnnnnnnnnnnnnnnnnnnnnnnnnnnnnnnnnnnnnnnnnnnnnnnnnnnnnnnnnnnnnnnnnnnnnnnnnnnnnnnnnnnnnnnnnnnnnnnnnnnnnnnnnnnnnnnnnnnnnnnnnnnnnnnnnnnnnnnnnnnnnnnnnnnnnnnnnnnnnnnnnnnnnnnnnnnnnnnnnnnnnnnnnnnnnnnnnnnnnnnnnnnnnnnnnnnnnnnnnnnnnnnnnnnnnnnnnnnnnnnnnnnnnnnnnnnnnnnnnnnnnnnnnnnnnnnnnnnnnnnnnnnnnnnnnnnnnnnnnnnnnnnnnnnnnnnnnnnnnnnnnnnnnnnnnnnnnnnnnnnnnnnnnnnnnnnnnnnnnnnnnnnnnnnnnnnnnnnnnnnnnnnnnnnnnnnnnnnnnnnnnnnnnnnnnnnnnnnnnnnnnnnnnnnnnnnnnnnnnnnnnnnnnnnnnnnnnnnnnnnnnnnnnnnnnnnnnnnnnnnnnnnnnnnnnnnnnnnnnnnnnnnnnnnnnnnnnnnnnnnnnnnnnnnnnnnnnnnnnnnnnnnnnnnnnnnnnnnnnnnnnnnnnnnnnnnnnnnnnnnnnnnnnnnnnnnnnnnnnnnnnnnnnnnnnnnnnnnnnnnnnnnnnnnnnnnnnnnnnnnnnnnnnnnnnnnnnnnnnnnnnnnnnnnnnnnnnnnnnnnnnnnnnnnnnnnnnnnnnnnnnnnnnnnnnnnnnnnnnnnnnnnnnnnnnnnnnnnnnnnnnnnnnnnnnnnnnnnnnnnnnnnnnnnnnnnnnnnnnnnnnnnnnnnnnnnnnnnnnnnnnnnnnnnnnnnnnnnnnnnnnnnnnnnnnnnnnnnnnnnnnnnnnnnnnnnnnnnnnnnnnnnnnnnnnnnnnnnnnnnnnnnnnnnnnnnnnnnnnnnnnnnnnnnnnnnnnnnnnnnnnnnnnnnnnnnnnnnnnnnnnnnnnnnnnnnnnnnnnnnnnnnnnnnnnnnnnnnnnnnnnnnnnnnnnnnnnnnnnnnnnnnnnnnnnnnnnnnnnnnnnnnnnnnnnnnnnnnnnnnnnnnnnnnnnnnnnnnnnnnnnnnnnnnnnnnnnnnnnnnnnnnnnnnnnnnnnnnnnnnnnnnnnnnnnnnnnnnnnnnnnnnnnnnnnnnnnnnnnnnnnnnnnnnnnnnnnnnnnnnnnnnnnnnnnnnnnnnnnnnnnnnnnnnnnnnnnnnnnnnnnnnnnnnnnnnnnnnnnnnnnnnnnnnnnnnnnnnnnnnnnnnnnnnnnnnnnnnnnnnnnnnnnnnnnnnnnnnnnnnnnnnnnnnnnnnnnnnnnnnnnnnnnnnnnnnnnnnnnnnnnnnnnnnnnnnnnnnnnnnnnnnnnnnnnnnnnnnnnnnnnnnnnnnnnnnnnnnnnnnnnnnnnnnnnnnnnnnnnnnnnnnnnnnnnnnnnnnnnnnnnnnnnnnnnnnnnnnnnnnnnnnnnnnnnnnnnnnnnnnnnnnnnnnnnnnnnnnnnnnnnnnnnnnnnnnnnnnnnnnnnnnnnnnnnnnnnnnnnnnnnnnnnnnnnnnnnnnnnnnnnnnnnnnnnnnnnnnnnnnnnnnnnnnnnnnnnnnnnnnnnnnnnnnnnnnnnnnnnnnnnnnnnnnnnnnnnnnnnnnnnnnnnnnnnnnnnnnnnnnnnnnnnnnnnnnnnnnnnnnnnnnnnnnnnnnnnnnnnnnnnnnnnnnnnnnnnnnnnnnnnnnnnnnnnnnnnnnnnnnnnnnnnnnnnnnnnnnnnnnnnnnnnnnnnnnnnnnnnnnnnnnnnnnnnnnnnnnnnnnnnnnnnnnnnnnnnnnnnnnnnnnnnnnnnnnnnnnnnnnnnnnnnnnnnnnnnnnnnnnnnnnnnnnnnnnnnnnnnnnnnnnnnnnnnnnnnnnnnnnnnnnnnnnnnnnnnnnnnnnnnnnnnnnnnnnnnnnnnnnnnnnnnnnnnnnnnnnnnnnnnnnnnnnnnnnnnnnnnnnnnnnnnnnnnnnnnnnnnnnnnnnnnnnnnnnnnnnnnnnnnnnnnnnnnnnnnnnnnnnnnnnnnnnnnnnnnnnnnnnnnnnnnnnnnnnnnnnnnnnnnnnnnnnnnnnnnnnnnnnnnnnnnnnnnnnnnnnnnnnnnnnnnnnnnnnnnnnnnnnnnnnnnnnnnnnnnnnnnnnnnnnnnnnnnnnnnnnnnnnnnnnnnnnnnnnnnnnnnnnnnnnnnnnnnnnnnnnnnnnnnnnnnnnnnnnnnnnnnnnnnnnnnnnnnnnnnnnnnnnnnnnnnnnnnnnnnnnnnnnnnnnnnnnnnnnnnnnnnnnnnnnnnnnnnnnnnnnnnnnnnnnnnnnnnnnnnnnnnnnnnnnnnnnnnnnnnnnnnnnnnnnnnnnnnnnnnnnnnnnnnnnnnnnnnnnnnnnnnnnnnnnnnnnnnnnnnnnnnnnnnnnnnnnnnnnnnnnnnnnnnnnnnnnnnnnnnnnnnnnnnnnnnnnnnnnnnnnnnnnnnnnnnnnnnnnnnnnnnnnnnnnnnnnnnnnnnnnnnnnnnnnnnnnnnnnnnnnnnnnnnnnnnnnnnnnnnnnnnnnnnnnnnnnnnnnnnnnnnnnnnnnnnnnnnnnnnnnnnnnnnnnnnnnnnnnnnnnnnnnnnnnnnnnnnnnnnnnnnnnnnnnnnnnnnnnnnnnnnnnnnnnnnnnnnnnnnnnnnnnnnnnnnnnnnnnnnnnnnnnnnnnnnnnnnnnnnnnnnnnnnnnnnnnnnnnnnnnnnnnnnnnnnnnnnnnnnnnnnnnnnnnnnnnnnnnnnnnnnnnnnnnnnnnnnnnnnnnnnnnnnnnnnnnnnnnnnnnnnnnnnnnnnnnnnnnnnnnnnnnnnnnnnnnnnnnnnnnnnnnnnnnnnnnnnnnnnnnnnnnnnnnnnnnnnnnnnnnnnnnnnnnnnnnnnnnnnnnnnnnnnnnnnnnnnnnnnnnnnnnnnnnnnnnnnnnnnnnnnnnnnnnnnnnnnnnnnnnnnnnnnnnnnnnnnnnnnnnnnnnnnnnnnnnnnnnnnnnnnnnnnnnnnnnnnnnnnnnnnnnnnnnnnnnnnnnnnnnnnnnnnnnnnnnnnnnnnnnnnnnnnnnnnnnnnnnnnnnnnnnnnnnnnnnnnnnnnnnnnnnnnnnnnnnnnnnnnnnnnnnnnnnnnnnnnnnnnnnnnnnnnnnnnnnnnnnnnnnnnnnnnnnnnnnnnnnnnnnnnnnnnnnnnnnnnnnnnnnnnnnnnnnnnnnnnnnnnnnnnnnnnnnnnnnnnnnnnnnnnnnnnnnnnnnnnnnnnnnnnnnnnnnnnnnnnnnnnnnnnnnnnnnnnnnnnnnnnnnnnnnnnnnnnnnnnnnnnnnnnnnnnnnnnnnnnnnnnnnnnnnnnnnnnnnnnnnnnnnnnnnnnnnnnnnnnnnnnnnnnnnnnnnnnnnnnnnnnnnnnnnnnnnnnnnnnnnnnnnnnnnnnnnnnnnnnnnnnnnnnnnnnnnnnnnnnnnnnnnnnnnnnnnnnnnnnnnnnnnnnnnnnnnnnnnnnnnnnnnnnnnnnnnnnnnnnnnnnnnnnnnnnnnnnnnnnnnnnnnnnnnnnnnnnnnnnnnnnnnnnnnnnnnnnnnnnnnnnnnnnnnnnnnnnnnnnnnnnnnnnnnnnnnnnnnnnnnnnnnnnnnnnnnnnnnnnnnnnnnnnnnnnnnnnnnnnnnnnnnnnnnnnnnnnnnnnnnnnnnnnnnnnnnnnnnnnnnnnnnnnnnnnnnnnnnnnnnnnnnnnnnnnnnnnnnnnnnnnnnnnnnnnnnnnnnnnnnnnnnnnnnnnnnnnnnnnnnnnnnnnnnnnnnnnnnnnnnnnnnnnnnnnnnnnnnnnnnnnnnnnnnnnnnnnnnnnnnnnnnnnnnnnnnnnnnnnnnnnnnnnnnnnnnnnnnnnnnnnnnnnnnnnnnnnnnnnnnnnnnnnnnnnnnnnnnnnnnnnnnnnnnnnnnnnnnnnnnnnnnnnnnnnnnnnnnnnnnnnnnnnnnnnnnnnnnnnnnnnnnnnnnnnnnnnnnnnnnnnnnnnnnnnnnnnnnnnnnnnnnnnnnnnnnnnnnnnnnnnnnnnnnnnnnnnnnnnnnnnnnnnnnnnnnnnnnnnnnnnnnnnnnnnnnnnnnnnnnnnnnnnnnnnnnnnnnnnnnnnnnnnnnnnnnnnnnnnnnnnnnnnnnnnnnnnnnnnnnnnnnnnnnnnnnnnnnnnnnnnnnnnnnnnnnnnnnnnnnnnnnnnnnnnnnnnnnnnnnnnnnnnnnnnnnnnnnnnnnnnnnnnnnnnnnnnnnnnnnnnnnnnnnnnnnnnnnnnnnnnnnnnnnnnnnnnnnnnnnnnnnnnnnnnnnnnnnnnnnnnnnnnnnnnnnnnnnnnnnnnnnnnnnnnnnnnnnnnnnnnnnnnnnnnnnnnnnnnnnnnnnnnnnnnnnnnnnnnnnnnnnnnnnnnnnnnnnnnnnnnnnnnnnnnnnnnnnnnnnnnnnnnnnnnnnnnnnnnnnnnnnnnnnnnnnnnnnnnnnnnnnnnnnnnnnnnnnnnnnnnnnnnnnnnnnnnnnnnnnnnnnnnnnnnnnnnnnnnnnnnnnnnnnnnnnnnnnnnnnnnnnnnnnnnnnnnnnnnnnnnnnnnnnnnnnnnnnnnnnnnnnnnnnnnnnnnnnnnnnnnnnnnnnnnnnnnnnnnnnnnnnnnnnnnnnnnnnnnnnnnnnnnnnnnnnnnnnnnnnnnnnnnnnnnnnnnnnnnnnnnnnnnnnnnnnnnnnnnnnnnnnnnnnnnnnnnnnnnnnnnnnnnnnnnnnnnnnnnnnnnnnnnnnnnnnnnnnnnnnnnnnnnnnnnnnnnnnnnnnnnnnnnnnnnnnnnnnnnnnnnnnnnnnnnnnnnnnnnnnnnnnnnnnnnnnnnnnnnnnnnnnnnnnnnnnnnnnnnnnnnnnnnnnnnnnnnnnnnnnnnnnnnnnnnnnnnnnnnnnnnnnnnnnnnnnnnnnnnnnnnnnnnnnnnnnnnnnnnnnnnnnnnnnnnnnnnnnnnnnnnnnnnnnnnnnnnnnnnnnnnnnnnnnnnnnnnnnnnnnnnnnnnnnnnnnnnnnnnnnnnnnnnnnnnnnnnnnnnnnnnnnnnnnnnnnnnnnnnnnnnnnnnnnnnnnnnnnnnnnnnnnnnnnnnnnnnnnnnnnnnnnnnnnnnnnnnnnnnnnnnnnnnnnnnnnnnnnnnnnnnnnnnnnnnnnnnnnnnnnnnnnnnnnnnnnnnnnnnnnnnnnnnnnnnnnnnnnnnnnnnnnnnnnnnnnnnnnnnnnnnnnnnnnnnnnnnnnnnnnnnnnnnnnnnnnnnnnnnnnnnnnnnnnnnnnnnnnnnnnnnnnnnnnnnnnnnnnnnnnnnnnnnnnnnnnnnnnnnnnnnnnnnnnnnnnnnnnnnnnnnnnnnnnnnnnnnnnnnnnnnnnnnnnnnnnnnnnnnnnnnnnnnnnnnnnnnnnnnnnnnnnnnnnnnnnnnnnnnnnnnnnnnnnnnnnnnnnnnnnnnnnnnnnnnnnnnnnnnnnnnnnnnnnnnnnnnnnnnnnnnnnnnnnnnnnnnnnnnnnnnnnnnnnnnnnnnnnnnnnnnnnnnnnnnnnnnnnnnnnnnnnnnnnnnnnnnnnnnnnnnnnnnnnnnnnnnnnnnnnnnnnnnnnnnnnnnnnnnnnnnnnnnnnnnnnnnnnnnnnnnnnnnnnnnnnnnnnnnnnnnnnnnnnnnnnnnnnnnnnnnnnnnnnnnnnnnnnnnnnnnnnnnnnnnnnnnnnnnnnnnnnnnnnnnnnnnnnnnnnnnnnnnnnnnnnnnnnnnnnnnnnnnnnnnnnnnnnnnnnnnnnnnnnnnnnnnnnnnnnnnnnnnnnnnnnnnnnnnnnnnnnnnnnnnnnnnnnnnnnnnnnnnnnnnnnnnnnnnnnnnnnnnnnnnnnnnnnnnnnnnnnnnnnnnnnnnnnnnnnnnnnnnnnnnnnnnnnnnnnnnnnnnnnnnnnnnnnnnnnnnnnnnnnnnnnnnnnnnnnnnnnnnnnnnnnnnnnnnnnnnnnnnnnnnnnnnnnnnnnnnnnnnnnnnnnnnnnnnnnnnnnnnnnnnnnnnnnnnnnnnnnnnnnnnnnnnnnnnnnnnnnnnnnnnnnnnnnnnnnnnnnnnnnnnnnnnnnnnnnnnnnnnnnnnnnnnnnnnnnnnnnnnnnnnnnnnnnnnnnnnnnnnnnnnnnnnnnnnnnnnnnnnnnnnnnnnnnnnnnnnnnnnnnnnnnnnnnnnnnnnnnnnnnnnnnnnnnnnnnnnnnnnnnnnnnnnnnnnnnnnnnnnnnnnnnnnnnnnnnnnnnnnnnnnnnnnnnnnnnnnnnnnnnnnnnnnnnnnnnnnnnnnnnnnnnnnnnnnnnnnnnnnnnnnnnnnnnnnnnnnnnnnnnnnnnnnnnnnnnnnnnnnnnnnnnnnnnnnnnnnnnnnnnnnnnnnnnnnnnnnnnnnnnnnnnnnnnnnnnnnnnnnnnnnnnnnnnnnnnnnnnnnnnnnnnnnnnnnnnnnnnnnnnnnnnnnnnnnnnnnnnnnnnnnnnnnnnnnnnnnnnnnnnnnnnnnnnnnnnnnnnnnnnnnnnnnnnnnnnnnnnnnnnnnnnnnnnnnnnnnnnnnnnnnnnnnnnnnnnnnnnnnnnnnnnnnnnnnnnnnnnnnnnnnnnnnnnnnnnnnnnnnnnnnnnnnnnnnnnnnnnnnnnnnnnnnnnnnnnnnnnnnnnnnnnnnnnnnnnnnnnnnnnnnnnnnnnnnnnnnnnnnnnnnnnnnnnnnnnnnnnnnnnnnnnnnnnnnnnnnnnnnnnnnnnnnnnnnnnnnnnnnnnnnnnnnnnnnnnnnnnnnnnnnnnnnnnnnnnnnnnnnnnnnnnnnnnnnnnnnnnnnnnnnnnnnnnnnnnnnnnnnnnnnnnnnnnnnnnnnnnnnnnnnnnnnnnnnnnnnnnnnnnnnnnnnnnnnnnnnnnnnnnnnnnnnnnnnnnnnnnnnnnnnnnnnnnnnnnnnnnnnnnnnnnnnnnnnnnnnnnnnnnnnnnnnnnnnnnnnnnnnnnnnnnnnnnnnnnnnnnnnnnnnnnnnnnnnnnnnnnnnnnnnnnnnnnnnnnnnnnnnnnnnnnnnnnnnnnnnnnnnnnnnnnnnnnnnnnnnnnnnnnnnnnnnnnnnnnnnnnnnnnnnnnnnnnnnnnnnnnnnnnnnnnnnnnnnnnnnnnnnnnnnnnnnnnnnnnnnnnnnnnnnnnnnnnnnnnnnnnnnnnnnnnnnnnnnnnnnnnnnnnnnnnnnnnnnnnnnnnnnnnnnnnnnnnnnnnnnnnnnnnnnnnnnnnnnnnnnnnnnnnnnnnnnnnnnnnnnnnnnnnnnnnnnnnnnnnnnnnnnnnnnnnnnnnnnnnnnnnnnnnnnnnnnnnnnnnnnnnnnnnnnnnnnnnnnnnnnnnnnnnnnnnnnnnnnnnnnnnnnnnnnnnnnnnnnnnnnnnnnnnnnnnnnnnnnnnnnnnnnnnnnnnnnnnnnnnnnnnnnnnnnnnnnnnnnnnnnnnnnnnnnnnnnnnnnnnnnnnnnnnnnnnnnnnnnnnnnnnnnnnnnnnnnnnnnnnnnnnnnnnnnnnnnnnnnnnnnnnnnnnnnnnnnnnnnnnnnnnnnnnnnnnnnnnnnnnnnnnnnnnnnnnnnnnnnnnnnnnnnnnnnnnnnnnnnnnnnnnnnnnnnnnnnnnnnnnnnnnnnnnnnnnnnnnnnnnnnnnnnnnnnnnnnnnnnnnnnnnnnnnnnnnnnnnnnnnnnnnnnnnnnnnnnnnnnnnnnnnnnnnnnnnnnnnnnnnnnnnnnnnnnnnnnnnnnnnnnnnnnnnnnnnnnnnnnnnnnnnnnnnnnnnnnnnnnnnnnnnnnnnnnnnnnnnnnnnnnnnnnnnnnnnnnnnnnnnnnnnnnnnnnnnnnnnnnnnnnnnnnnnnnnnnnnnnnnnnnnnnnnnnnnnnnnnnnnnnnnnnnnnnnnnnnnnnnnnnnnnnnnnnnnnnnnnnnnnnnnnnnnnnnnnnnnnnnnnnnnnnnnnnnnnnnnnnnnnnnnnnnnnnnnnnnnnnnnnnnnnnnnnnnnnnnnnnnnnnnnnnnnnnnnnnnnnnnnnnnnnnnnnnnnnnnnnnnnnnnnnnnnnnnnnnnnnnnnnnnnnnnnnnnnnnnnnnnnnnnnnnnnnnnnnnnnnnnnnnnnnnnnnnnnnnnnnnnnnnnnnnnnnnnnnnnnnnnnnnnnnnnnnnnnnnnnnnnnnnnnnnnnnnnnnnnnnnnnnnnnnnnnnnnnnnnnnnnnnnnnnnnnnnnnnnnnnnnnnnnnnnnnnnnnnnnnnnnnnnnnnnnnnnnnnnnnnnnnnnnnnnnnnnnnnnnnnnnnnnnnnnnnnnnnnnnnnnnnnnnnnnnnnnnnnnnnnnnnnnnnnnnnnnnnnnnnnnnnnnnnnnnnnnnnnnnnnnnnnnnnnnnnnnnnnnnnnnnnnnnnnnnnnnnnnnnnnnnnnnnnnnnnnnnnnnnnnnnnnnnnnnnnnnnnnnnnnnnnnnnnnnnnnnnnnnnnnnnnnnnnnnnnnnnnnnnnnnnnnnnnnnnnnnnnnnnnnnnnnnnnnnnnnnnnnnnnnnnnnnnnnnnnnnnnnnnnnnnnnnnnnnnnnnnnnnnnnnnnnnnnnnnnnnnnnnnnnnnnnnnnnnnnnnnnnnnnnnnnnnnnnnnnnnnnnnnnnnnnnnnnnnnnnnnnnnnnnnnnnnnnnnnnnnnnnnnnnnnnnnnnnnnnnnnnnnnnnnnnnnnnnnnnnnnnnnnnnnnnnnnnnnnnnnnnnnnnnnnnnnnnnnnnnnnnnnnnnnnnnnnnnnnnnnnnnnnnnnnnnnnnnnnnnnnnnnnnnnnnnnnnnnnnnnnnnnnnnnnnnnnnnnnnnnnnnnnnnnnnnnnnnnnnnnnnnnnnnnnnnnnnnnnnnnnnnnnnnnnnnnnnnnnnnnnnnnnnnnnnnnnnnnnnnnnnnnnnnnnnnnnnnnnnnnnnnnnnnnnnnnnnnnnnnnnnnnnnnnnnnnnnnnnnnnnnnnnnnnnnnnnnnnnnnnnnnnnnnnnnnnnnnnnnnnnnnnnnnnnnnnnnnnnnnnnnnnnnnnnnnnnnnnnnnnnnnnnnnnnnnnnnnnnnnnnnnnnnnnnnnnnnnnnnnnnnnnnnnnnnnnnnnnnnnnnnnnnnnnnnnnnnnnnnnnnnnnnnnnnnnnnnnnnnnnnnnnnnnnnnnnnnnnnnnnnnnnnnnnnnnnnnnnnnnnnnnnnnnnnnnnnnnnnnnnnnnnnnnnnnnnnnnnnnnnnnnnnnnnnnnnnnnnnnnnnnnnnnnnnnnnnnnnnnnnnnnnnnnnnnnnnnnnnnnnnnnnnnnnnnnnnnnnnnnnnnnnnnnnnnnnnnnnnnnnnnnnnnnnnnnnnnnnnnnnnnnnnnnnnnnnnnnnnnnnnnnnnnnnnnnnnnnnnnnnnnnnnnnnnnnnnnnnnnnnnnnnnnnnnnnnnnnnnnnnnnnnnnnnnnnnnnnnnnnnnnnnnnnnnnnnnnnnnnnnnnnnnnnnnnnnnnnnnnnnnnnnnnnnnnnnnnnnnnnnnnnnnnnnnnnnnnnnnnnnnnnnnnnnnnnnnnnnnnnnnnnnnnnnnnnnnnnnnnnnnnnnnnnnnnnnnnnnnnnnnnnnnnnnnnnnnnnnnnnnnnnnnnnnnnnnnnnnnnnnnnnnnnnnnnnnnnnnnnnnnnnnnnnnnnnnnnnnnnnnnnnnnnnnnnnnnnnnnnnnnnnnnnnnnnnnnnnnnnnnnnnnnnnnnnnnnnnnnnnnnnnnnnnnnnnnnnnnnnnnnnnnnnnnnnnnnnnnnnnnnnnnnnnnnnnnnnnnnnnnnnnnnnnnnnnnnnnnnnnnnnnnnnnnnnnnnnnnnnnnnnnnnnnnnnnnnnnnnnnnnnnnnnnnnnnnnnnnnnnnnnnnnnnnnnnnnnnnnnnnnnnnnnnnnnnnnnnnnnnnnnnnnnnnnnnnnnnnnnnnnnnnnnnnnnnnnnnnnnnnnnnnnnnnnnnnnnnnnnnnnnnnnnnnnnnnnnnnnnnnnnnnnnnnnnnnnnnnnnnnnnnnnnnnnnnnnnnnnnnnnnnnnnnnnnnnnnnnnnnnnnnnnnnnnnnnnnnnnnnnnnnnnnnnnnnnnnnnnnnnnnnnnnnnnnnnnnnnnnnnnnnnnnnnnnnnnnnnnnnnnnnnnnnnnnnnnnnnnnnnnnnnnnnnnnnnnnnnnnnnnnnnnnnnnnnnnnnnnnnnnnnnnnnnnnnnnnnnnnnnnnnnnnnnnnnnnnnnnnnnnnnnnnnnnnnnnnnnnnnnnnnnnnnnnnnnnnnnnnnnnnnnnnnnnnnnnnnnnnnnnnnnnnnnnnnnnnnnnnnnnnnnnnnnnnnnnnnnnnnnnnnnnnnnnnnnnnnnnnnnnnnnnnnnnnnnnnnnnnnnnnnnnnnnnnnnnnnnnnnnnnnnnnnnnnnnnnnnnnnnnnnnnnnnnnnnnnnnnnnnnnnnnnnnnnnnnnnnnnnnnnnnnnnnnnnnnnnnnnnnnnnnnnnnnnnnnnnnnnnnnnnnnnnnnnnnnnnnnnnnnnnnnnnnnnnnnnnnnnnnnnnnnnnnnnnnnnnnnnnnnnnnnnnnnnnnnnnnnnnnnnnnnnnnnnnnnnnnnnnnnnnnnnnnnnnnnnnnnnnnnnnnnnnnnnnnnnnnnnnnnnnnnnnnnnnnnnnnnnnnnnnnnnnnnnnnnnnnnnnnnnnnnnnnnnnnnnnnnnnnnnnnnnnnnnnnnnnnnnnnnnnnnnnnnnnnnnnnnnnnnnnnnnnnnnnnnnnnnnnnnnnnnnnnnnnnnnnnnnnnnnnnnnnnnnnnnnnnnnnnnnnnnnnnnnnnnnnnnnnnnnnnnnnnnnnnnnnnnnnnnnnnnnnnnnnnnnnnnnnnnnnnnnnnnnnnnnnnnnnnnnnnnnnnnnnnnnnnnnnnnnnnnnnnnnnnnnnnnnnnnnnnnnnnnnnnnnnnnnnnnnnnnnnnnnnnnnnnnnnnnnnnnnnnnnnnnnnnnnnnnnnnnnnnnnnnnnnnnnnnnnnnnnnnnnnnnnnnnnnnnnnnnnnnnnnnnnnnnnnnnnnnnnnnnnnnnnnnnnnnnnnnnnnnnnnnnnnnnnnnnnnnnnnnnnnnnnnnnnnnnnnnnnnnnnnnnnnnnnnnnnnnnnnnnnnnnnnnnnnnnnnnnnnnnnnnnnnnnnnnnnnnnnnnnnnnnnnnnnnnnnnnnnnnnnnnnnnnnnnnnnnnnnnnnnnnnnnnnnnnnnnnnnnnnnnnnnnnnnnnnnnnnnnnnnnnnnnnnnnnnnnnnnnnnnnnnnnnnnnnnnnnnnnnnnnnnnnnnnnnnnnnnnnnnnnnnnnnnnnnnnnnnnnnnnnnnnnnnnnnnnnnnnnnnnnnnnnnnnnnnnnnnnnnnnnnnnnnnnnnnnnnnnnnnnnnnnnnnnnnnnnnnnnnnnnnnnnnnnnnnnnnnnnnnnnnnnnnnnnnnnnnnnnnnnnnnnnnnnnnnnnnnnnnnnnnnnnnnnnnnnnnnnnnnnnnnnnnnnnnnnnnnnnnnnnnnnnnnnnnnnnnnnnnnnnnnnnnnnnnnnnnnnnnnnnnnnnnnnnnnnnnnnnnnnnnnnnnnnnnnnnnnnnnnnnnnnnnnnnnnnnnnnnnnnnnnnnnnnnnnnnnnnnnnnnnnnnnnnnnnnnnnnnnnnnnnnnnnnnnnnnnnnnnnnnnnnnnnnnnnnnnnnnnnnnnnnnnnnnnnnnnnnnnnnnnnnnnnnnnnnnnnnnnnnnnnnnnnnnnnnnnnnnnnnnnnnnnnnnnnnnnnnnnnnnnnnnnnnnnnnnnnnnnnnnnnnnnnnnnnnnnnnnnnnnnnnnnnnnnnnnnnnnnnnnnnnnnnnnnnnnnnnnnnnnnnnnnnnnnnnnnnnnnnnnnnnnnnnnnnnnnnnnnnnnnnnnnnnnnnnnnnnnnnnnnnnnnnnnnnnnnnnnnnnnnnnnnnnnnnnnnnnnnnnnnnnnnnnnnnnnnnnnnnnnnnnnnnnnnnnnnnnnnnnnnnnnnnnnnnnnnnnnnnnnnnnnnnnnnnnnnnnnnnnnnnnnnnnnnnnnnnnnnnnnnnnnnnnnnnnnnnnnnnnnnnnnnnnnnnnnnnnnnnnnnnnnnnnnnnnnnnnnnnnnnnnnnnnnnnnnnnnnnnnnnnnnnnnnnnnnnnnnnnnnnnnnnnnnnnnnnnnnnnnnnnnnnnnnnnnnnnnnnnnnnnnnnnnnnnnnnnnnnnnnnnnnnnnnnnnnnnnnnnnnnnnnnnnnnnnnnnnnnnnnnnnnnnnnnnnnnnnnnnnnnnnnnnnnnnnnnnnnnnnnnnnnnnnnnnnnnnnnnnnnnnnnnnnnnnnnnnnnnnnnnnnnnnnnnnnnnnnnnnnnnnnnnnnnnnnnnnnnnnnnnnnnnnnnnnnnnnnnnnnnnnnnnnnnnnnnnnnnnnnnnnnnnnnnnnnnnnnnnnnnnnnnnnnnnnnnnnnnnnnnnnnnnnnnnnnnnnnnnnnnnnnnnnnnnnnnnnnnnnnnnnnnnnnnnnnnnnnnnnnnnnnnnnnnnnnnnnnnnnnnnnnnnnnnnnnnnnnnnnnnnnnnnnnnnnnnnnnnnnnnnnnnnnnnnnnnnnnnnnnnnnnnnnnnnnnnnnnnnnnnnnnnnnnnnnnnnnnnnnnnnnnnnnnnnnnnnnnnnnnnnnnnnnnnnnnnnnnnnnnnnnnnnnnnnnnnnnnnnnnnnnnnnnnnnnnnnnnnnnnnnnnnnnnnnnnnnnnnnnnnnnnnnnnnnnnnnnnnnnnnnnnnnnnnnnnnnnnnnnnnnnnnnnnnnnnnnnnnnnnnnnnnnnnnnnnnnnnnnnnnnnnnnnnnnnnnnnnnnnnnnnnnnnnnnnnnnnnnnnnnnnnnnnnnnnnnnnnnnnnnnnnnnnnnnnnnnnnnnnnnnnnnnnnnnnnnnnnnnnnnnnnnnnnnnnnnnnnnnnnnnnnnnnnnnnnnnnnnnnnnnnnnnnnnnnnnnnnnnnnnnnnnnnnnnnnnnnnnnnnnnnnnnnnnnnnnnnnnnnnnnnnnnnnnnnnnnnnnnnnnnnnnnnnnnnnnnnnnnnnnnnnnnnnnnnnnnnnnnnnnnnnnnnnnnnnnnnnnnnnnnnnnnnnnnnnnnnnnnnnnnnnnnnnnnnnnnnnnnnnnnnnnnnnnnnnnnnnnnnnnnnnnnnnnnnnnnnnnnnnnnnnnnnnnnnnnnnnnnnnnnnnnnnnnnnnnnnnnnnnnnnnnnnnnnnnnnnnnnnnnnnnnnnnnnnnnnnnnnnnnnnnnnnnnnnnnnnnnnnnnnnnnnnnnnnnnnnnnnnnnnnnnnnnnnnnnnnnnnnnnnnnnnnnnnnnnnnnnnnnnnnnnnnnnnnnnnnnnnnnnnnnnnnnnnnnnnnnnnnnnnnnnnnnnnnnnnnnnnnnnnnnnnnnnnnnnnnnnnnnnnnnnnnnnnnnnnnnnnnnnnnnnnnnnnnnnnnnnnnnnnnnnnnnnnnnnnnnnnnnnnnnnnnnnnnnnnnnnnnnnnnnnnnnnnnnnnnnnnnnnnnnnnnnnnnnnnnnnnnnnnnnnnnnnnnnnnnnnnnnnnnnnnnnnnnnnnnnnnnnnnnnnnnnnnnnnnnnnnnnnnnnnnnnnnnnnnnnnnnnnnnnnnnnnnnnnnnnnnnnnnnnnnnnnnnnnnnnnnnnnnnnnnnnnnnnnnnnnnnnnnnnnnnnnnnnnnnnnnnnnnnnnnnnnnnnnnnnnnnnnnnnnnnnnnnnnnnnnnnnnnnnnnnnnnnnnnnnnnnnnnnnnnnnnnnnnnnnnnnnnnnnnnnnnnnnnnnnnnnnnnnnnnnnnnnnnnnnnnnnnnnnnnnnnnnnnnnnnnnnnnnnnnnnnnnnnnnnnnnnnnnnnnnnnnnnnnnnnnnnnnnnnnnnnnnnnnnnnnnnnnnnnnnnnnnnnnnnnnnnnnnnnnnnnnnnnnnnnnnnnnnnnnnnnnnnnnnnnnnnnnnnnnnnnnnnnnnnnnnnnnnnnnnnnnnnnnnnnnnnnnnnnnnnnnnnnnnnnnnnnnnnnnnnnnnnnnnnnnnnnnnnnnnnnnnnnnnnnnnnnnnnnnnnnnnnnnnnnnnnnnnnnnnnnnnnnnnnnnnnnnnnnnnnnnnnnnnnnnnnnnnnnnnnnnnnnnnnnnnnnnnnnnnnnnnnnnnnnnnnnnnnnnnnnnnnnnnnnnnnnnnnnnnnnnnnnnnnnnnnnnnnnnnnnnnnnnnnnnnnnnnnnnnnnnnnnnnnnnnnnnnnnnnnnnnnnnnnnnnnnnnnnnnnnnnnnnnnnnnnnnnnnnnnnnnnnnnnnnnnnnnnnnnnnnnnnnnnnnnnnnnnnnnnnnnnnnnnnnnnnnnnnnnnnnnnnnnnnnnnnnnnnnnnnnnnnnnnnnnnnnnnnnnnnnnnnnnnnnnnnnnnnnnnnnnnnnnnnnnnnnnnnnnnnnnnnnnnnnnnnnnnnnnnnnnnnnnnnnnnnnnnnnnnnnnnnnnnnnnnnnnnnnnnnnnnnnnnnnnnnnnnnnnnnnnnnnnnnnnnnnnnnnnnnnnnnnnnnnnnnnnnnnnnnnnnnnnnnnnnnnnnnnnnnnnnnnnnnnnnnnnnnnnnnnnnnnnnnnnnnnnnnnnnnnnnnnnnnnnnnnnnnnnnnnnnnnnnnnnnnnnnnnnnnnnnnnnnnnnnnnnnnnnnnnnnnnnnnnnnnnnnnnnnnnnnnnnnnnnnnnnnnnnnnnnnnnnnnnnnnnnnnnnnnnnnnnnnnnnnnnnnnnnnnnnnnnnnnnnnnnnnnnnnnnnnnnnnnnnnnnnnnnnnnnnnnnnnnnnnnnnnnnnnnnnnnnnnnnnnnnnnnnnnnnnnnnnnnnnnnnnnnnnnnnnnnnnnnnnnnnnnnnnnnnnnnnnnnnnnnnnnnnnnnnnnnnnnnnnnnnnnnnnnnnnnnnnnnnnnnnnnnnnnnnnnnnnnnnnnnnnnnnnnnnnnnnnnnnnnnnnnnnnnnnnnnnnnnnnnnnnnnnnnnnnnnnnnnnnnnnnnnnnnnnnnnnnnnnnnnnnnnnnnnnnnnnnnnnnnnnnnnnnnnnnnnnnnnnnnnnnnnnnnnnnnnnnnnnnnnnnnnnnnnnnnnnnnnnnnnnnnnnnnnnnnnnnnnnnnnnnnnnnnnnnnnnnnnnnnnnnnnnnnnnnnnnnnnnnnnnnnnnnnnnnnnnnnnnnnnnnnnnnnnnnnnnnnnnnnnnnnnnnnnnnnnnnnnnnnnnnnnnnnnnnnnnnnnnnnnnnnnnnnnnnnnnnnnnnnnnnnnnnnnnnnnnnnnnnnnnnnnnnnnnnnnnnnnnnnnnnnnnnnnnnnnnnnnnnnnnnnnnnnnnnnnnnnnnnnnnnnnnnnnnnnnnnnnnnnnnnnnnnnnnnnnnnnnnnnnnnnnnnnnnnnnnnnnnnnnnnnnnnnnnnnnnnnnnnnnnnnnnnnnnnnnnnnnnnnnnnnnnnnnnnnnnnnnnnnnnnnnnnnnnnnnnnnnnnnnnnnnnnnnnnnnnnnnnnnnnnnnnnnnnnnnnnnnnnnnnnnnnnnnnnnnnnnnnnnnnnnnnnnnnnnnnnnnnnnnnnnnnnnnnnnnnnnnnnnnnnnnnnnnnnnnnnnnnnnnnnnnnnnnnnnnnnnnnnnnnnnnnnnnnnnnnnnnnnnnnnnnnnnnnnnnnnnnnnnnnnnnnnnnnnnnnnnnnnnnnnnnnnnnnnnnnnnnnnnnnnnnnnnnnnnnnnnnnnnnnnnnnnnnnnnnnnnnnnnnnnnnnnnnnnnnnnnnnnnnnnnnnnnnnnnnnnnnnnnnnnnnnnnnnnnnnnnnnnnnnnnnnnnnnnnnnnnnnnnnnnnnnnnnnnnnnnnnnnnnnnnnnnnnnnnnnnnnnnnnnnnnnnnnnnnnnnnnnnnnnnnnnnnnnnnnnnnnnnnnnnnnnnnnnnnnnnnnnnnnnnnnnnnnnnnnnnnnnnnnnnnnnnnnnnnnnnnnnnnnnnnnnnnnnnnnnnnnnnnnnnnnnnnnnnnnnnnnnnnnnnnnnnnnnnnnnnnnnnnnnnnnnnnnnnnnnnnnnnnnnnnnnnnnnnnnnnnnnnnnnnnnnnnnnnnnnnnnnnnnnnnnnnnnnnnnnnnnnnnnnnnnnnnnnnnnnnnnnnnnnnnnnnnnnnnnnnnnnnnnnnnnnnnnnnnnnnnnnnnnnnnnnnnnnnnnnnnnnnnnnnnnnnnnnnnnnnnnnnnnnnnnnnnnnnnnnnnnnnnnnnnnnnnnnnnnnnnnnnnnnnnnnnnnnnnnnnnnnnnnnnnnnnnnnnnnnnnnnnnnnnnnnnnnnnnnnnnnnnnnnnnnnnnnnnnnnnnnnnnnnnnnnnnnnnnnnnnnnnnnnnnnnnnnnnnnnnnnnnnnnnnnnnnnnnnnnnnnnnnnnnnnnnnnnnnnnnnnnnnnnnnnnnnnnnnnnnnnnnnnnnnnnnnnnnnnnnnnnnnnnnnnnnnnnnnnnnnnnnnnnnnnnnnnnnnnnnnnnnnnnnnnnnnnnnnnnnnnnnnnnnnnnnnnnnnnnnnnnnnnnnnnnnnnnnnnnnnnnnnnnnnnnnnnnnnnnnnnnnnnnnnnnnnnnnnnnnnnnnnnnnnnnnnnnnnnnnnnnnnnnnnnnnnnnnnnnnnnnnnnnnnnnnnnnnnnnnnnnnnnnnnnnnnnnnnnnnnnnnnnnnnnnnnnnnnnnnnnnnnnnnnnnnnnnnnnnnnnnnnnnnnnnnnnnnnnnnnnnnnnnnnnnnnnnnnnnnnnnnnnnnnnnnnnnnnnnnnnnnnnnnnnnnnnnnnnnnnnnnnnnnnnnnnnnnnnnnnnnnnnnnnnnnnnnnnnnnnnnnnnnnnnnnnnnnnnnnnnnnnnnnnnnnnnnnnnnnnnnnnnnnnnnnnnnnnnnnnnnnnnnnnnnnnnnnnnnnnnnnnnnnnnnnnnnnnnnnnnnnnnnnnnnnnnnnnnnnnnnnnnnnnnnnnnnnnnnnnnnnnnnnnnnnnnnnnnnnnnnnnnnnnnnnnnnnnnnnnnnnnnnnnnnnnnnnnnnnnnnnnnnnnnnnnnnnnnnnnnnnnnnnnnnnnnnnnnnnnnnnnnnnnnnnnnnnnnnnnnnnnnnnnnnnnnnnnnnnnnnnnnnnnnnnnnnnnnnnnnnnnnnnnnnnnnnnnnnnnnnnnnnnnnnnnnnnnnnnnnnnnnnnnnnnnnnnnnnnnnnnnnnnnnnnnnnnnnnnnnnnnnnnnnnnnnnnnnnnnnnnnnnnnnnnnnnnnnnnnnnnnnnnnnnnnnnnnnnnnnnnnnnnnnnnnnnnnnnnnnnnnnnnnnnnnnnnnnnnnnnnnnnnnnnnnnnnnnnnnnnnnnnnnnnnnnnnnnnnnnnnnnnnnnnnnnnnnnnnnnnnnnnnnnnnnnnnnnnnnnnnnnnnnnnnnnnnnnnnnnnnnnnnnnnnnnnnnnnnnnnnnnnnnnnnnnnnnnnnnnnnnnnnnnnnnnnnnnnnnnnnnnnnnnnnnnnnnnnnnnnnnnnnnnnnnnnnnnnnnnnnnnnnnnnnnnnnnnnnnnnnnnnnnnnnnnnnnnnnnnnnnnnnnnnnnnnnnnnnnnnnnnnnnnnnnnnnnnnnnnnnnnnnnnnnnnnnnnnnnnnnnnnnnnnnnnnnnnnnnnnnnnnnnnnnnnnnnnnnnnnnnnnnnnnnnnnnnnnnnnnnnnnnnnnnnnnnnnnnnnnnnnnnnnnnnnnnnnnnnnnnnnnnnnnnnnnnnnnnnnnnnnnnnnnnnnnnnnnnnnnnnnnnnnnnnnnnnnnnnnnnnnnnnnnnnnnnnnnnnnnnnnnnnnnnnnnnnnnnnnnnnnnnnnnnnnnnnnnnnnnnnnnnnnnnnnnnnnnnnnnnnnnnnnnnnnnnnnnnnnnnnnnnnnnnnnnnnnnnnnnnnnnnnnnnnnnnnnnnnnnnnnnnnnnnnnnnnnnnnnnnnnnnnnnnnnnnnnnnnnnnnnnnnnnnnnnnnnnnnnnnnnnnnnnnnnnnnnnnnnnnnnnnnnnnnnnnnnnnnnnnnnnnnnnnnnnnnnnnnnnnnnnnnnnnnnnnnnnnnnnnnnnnnnnnnnnnnnnnnnnnnnnnnnnnnnnnnnnnnnnnnnnnnnnnnnnnnnnnnnnnnnnnnnnnnnnnnnnnnnnnnnnnnnnnnnnnnnnnnnnnnnnnnnnnnnnnnnnnnnnnnnnnnnnnnnnnnnnnnnnnnnnnnnnnnnnnnnnnnnnnnnnnnnnnnnnnnnnnnnnnnnnnnnnnnnnnnnnnnnnnnnnnnnnnnnnnnnnnnnnnnnnnnnnnnnnnnnnnnnnnnnnnnnnnnnnnnnnnnnnnnnnnnnnnnnnnnnnnnnnnnnnnnnnnnnnnnnnnnnnnnnnnnnnnnnnnnnnnnnnnnnnnnnnnnnnnnnnnnnnnnnnnnnnnnnnnnnnnnnnnnnnnnnnnnnnnnnnnnnnnnnnnnnnnnnnnnnnnnnnnnnnnnnnnnnnnnnnnnnnnnnnnnnnnnnnnnnnnnnnnnnnnnnnnnnnnnnnnnnnnnnnnnnnnnnnnnnnnnnnnnnnnnnnnnnnnnnnnnnnnnnnnnnnnnnnnnnnnnnnnnnnnnnnnnnnnnnnnnnnnnnnnnnnnnnnnnnnnnnnnnnnnnnnnnnnnnnnnnnnnnnnnnnnnnnnnnnnnnnnnnnnnnnnnnnnnnnnnnnnnnnnnnnnnnnnnnnnnnnnnnnnnnnnnnnnnnnnnnnnnnnnnnnnnnnnnnnnnnnnnnnnnnnnnnnnnnnnnnnnnnnnnnnnnnnnnnnnnnnnnnnnnnnnnnnnnnnnnnnnnnnnnnnnnnnnnnnnnnnnnnnnnnnnnnnnnnnnnnnnnnnnnnnnnnnnnnnnnnnnnnnnnnnnnnnnnnnnnnnnnnnnnnnnnnnnnnnnnnnnnnnnnnnnnnnnnnnnnnnnnnnnnnnnnnnnnnnnnnnnnnnnnnnnnnnnnnnnnnnnnnnnnnnnnnnnnnnnnnnnnnnnnnnnnnnnnnnnnnnnnnnnnnnnnnnnnnnnnnnnnnnnnnnnnnnnnnnnnnnnnnnnnnnnnnnnnnnnnnnnnnnnnnnnnnnnnnnnnnnnnnnnnnnnnnnnnnnnnnnnnnnnnnnnnnnnnnnnnnnnnnnnnnnnnnnnnnnnnnnnnnnnnnnnnnnnnnnnnnnnnnnnnnnnnnnnnnnnnnnnnnnnnnnnnnnnnnnnnnnnnnnnnnnnnnnnnnnnnnnnnnnnnnnnnnnnnnnnnnnnnnnnnnnnnnnnnnnnnnnnnnnnnnnnnnnnnnnnnnnnnnnnnnnnnnnnnnnnnnnnnnnnnnnnnnnnnnnnnnnnnnnnnnnnnnnnnnnnnnnnnnnnnnnnnnnnnnnnnnnnnnnnnnnnnnnnnnnnnnnnnnnnnnnnnnnnnnnnnnnnnnnnnnnnnnnnnnnnnnnnnnnnnnnnnnnnnnnnnnnnnnnnnnnnnnnnnnnnnnnnnnnnnnnnnnnnnnnnnnnnnnnnnnnnnnnnnnnnnnnnnnnnnnnnnnnnnnnnnnnnnnnnnnnnnnnnnnnnnnnnnnnnnnnnnnnnnnnnnnnnnnnnnnnnnnnnnnnnnnnnnnnnnnnnnnnnnnnnnnnnnnnnnnnnnnnnnnnnnnnnnnnnnnnnnnnnnnnnnnnnnnnnnnnnnnnnnnnnnnnnnnnnnnnnnnnnnnnnnnnnnnnnnnnnnnnnnnnnnnnnnnnnnnnnnnnnnnnnnnnnnnnnnnnnnnnnnnnnnnnnnnnnnnnnnnnnnnnnnnnnnnnnnnnnnnnnnnnnnnnnnnnnnnnnnnnnnnnnnnnnnnnnnnnnnnnnnnnnnnnnnnnnnnnnnnnnnnnnnnnnnnnnnnnnnnnnnnnnnnnnnnnnnnnnnnnnnnnnnnnnnnnnnnnnnnnnnnnnnnnnnnnnnnnnnnnnnnnnnnnnnnnnnnnnnnnnnnnnnnnnnnnnnnnnnnnnnnnnnnnnnnnnnnnnnnnnnnnnnnnnnnnnnnnnnnnnnnnnnnnnnnnnnnnnnnnnnnnnnnnnnnnnnnnnnnnnnnnnnnnnnnnnnnnnnnnnnnnnnnnnnnnnnnnnnnnnnnnnnnnnnnnnnnnnnnnnnnnnnnnnnnnnnnnnnnnnnnnnnnnnnnnnnnnnnnnnnnnnnnnnnnnnnnnnnnnnnnnnnnnnnnnnnnnnnnnnnnnnnnnnnnnnnnnnnnnnnnnnnnnnnnnnnnnnnnnnnnnnnnnnnnnnnnnnnnnnnnnnnnnnnnnnnnnnnnnnnnnnnnnnnnnnnnnnnnnnnnnnnnnnnnnnnnnnnnnnnnnnnnnnnnnnnnnnnnnnnnnnnnnnnnnnnnnnnnnnnnnnnnnnnnnnnnnnnnnnnnnnnnnnnnnnnnnnnnnnnnnnnnnnnnnnnnnnnnnnnnnnnnnnnnnnnnnnnnnnnnnnnnnnnnnnnnnnnnnnnnnnnnnnnnnnnnnnnnnnnnnnnnnnnnnnnnnnnnnnnnnnnnnnnnnnnnnnnnnnnnnnnnnnnnnnnnnnnnnnnnnnnnnnnnnnnnnnnnnnnnnnnnnnnnnnnnnnnnnnnnnnnnnnnnnnnnnnnnnnnnnnnnnnnnnnnnnnnnnnnnnnnnnnnnnnnnnnnnnnnnnnnnnnnnnnnnnnnnnnnnnnnnnnnnnnnnnnnnnnnnnnnnnnnnnnnnnnnnnnnnnnnnnnnnnnnnnnnnnnnnnnnnnnnnnnnnnnnnnnnnnnnnnnnnnnnnnnnnnnnnnnnnnnnnnnnnnnnnnnnnnnnnnnnnnnnnnnnnnnnnnnnnnnnnnnnnnnnnnnnnnnnnnnnnnnnnnnnnnnnnnnnnnnnnnnnnnnnnnnnnnnnnnnnnnnnnnnnnnnnnnnnnnnnnnnnnnnnnnnnnnnnnnnnnnnnnnnnnnnnnnnnnnnnnnnnnnnnnnnnnnnnnnnnnnnnnnnnnnnnnnnnnnnnnnnnnnnnnnnnnnnnnnnnnnnnnnnnnnnnnnnnnnnnnnnnnnnnnnnnnnnnnnnnnnnnnnnnnnnnnnnnnnnnnnnnnnnnnnnnnnnnnnnnnnnnnnnnnnnnnnnnnnnnnnnnnnnnnnnnnnnnnnnnnnnnnnnnnnnnnnnnnnnnnnnnnnnnnnnnnnnnnnnnnnnnnnnnnnnnnnnnnnnnnnnnnnnnnnnnnnnnnnnnnnnnnnnnnnnnnnnnnnnnnnnnnnnnnnnnnnnnnnnnnnnnnnnnnnnnnnnnnnnnnnnnnnnnnnnnnnnnnnnnnnnnnnnnnnnnnnnnnnnnnnnnnnnnnnnnnnnnnnnnnnnnnnnnnnnnnnnnnnnnnnnnnnnnnnnnnnnnnnnnnnnnnnnnnnnnnnnnnnnnnnnnnnnnnnnnnnnnnnnnnnnnnnnnnnnnnnnnnnnnnnnnnnnnnnnnnnnnnnnnnnnnnnnnnnnnnnnnnnnnnnnnnnnnnnnnnnnnnnnnnnnnnnnnnnnnnnnnnnnnnnnnnnnnnnnnnnnnnnnnnnnnnnnnnnnnnnnnnnnnnnnnnnnnnnnnnnnnnnnnnnnnnnnnnnnnnnnnnnnnnnnnnnnnnnnnnnnnnnnnnnnnnnnnnnnnnnnnnnnnnnnnnnnnnnnnnnnnnnnnnnnnnnnnnnnnnnnnnnnnnnnnnnnnnnnnnnnnnnnnnnnnnnnnnnnnnnnnnnnnnnnnnnnnnnnnnnnnnnnnnnnnnnnnnnnnnnnnnnnnnnnnnnnnnnnnnnnnnnnnnnnnnnnnnnnnnnnnnnnnnnnnnnnnnnnnnnnnnnnnnnnnnnnnnnnnnnnnnnnnnnnnnnnnnnnnnnnnnnnnnnnnnnnnnnnnnnnnnnnnnnnnnnnnnnnnnnnnnnnnnnnnnnnnnnnnnnnnnnnnnnnnnnnnnnnnnnnnnnnnnnnnnnnnnnnnnnnnnnnnnnnnnnnnnnnnnnnnnnnnnnnnnnnnnnnnnnnnnnnnnnnnnnnnnnnnnnnnnnnnnnnnnnnnnnnnnnnnnnnnnnnnnnnnnnnnnnnnnnnnnnnnnnnnnnnnnnnnnnnnnnnnnnnnnnnnnnnnnnnnnnnnnnnnnnnnnnnnnnnnnnnnnnnnnnnnnnnnnnnnnnnnnnnnnnnnnnnnnnnnnnnnnnnnnnnnnnnnnnnnnnnnnnnnnnnnnnnnnnnnnnnnnnnnnnnnnnnnnnnnnnnnnnnnnnnnnnnnnnnnnnnnnnnnnnnnnnnnnnnnnnnnnnnnnnnnnnnnnnnnnnnnnnnnnnnnnnnnnnnnnnnnnnnnnnnnnnnnnnnnnnnnnnnnnnnnnnnnnnnnnnnnnnnnnnnnnnnnnnnnnnnnnnnnnnnnnnnnnnnnnnnnnnnnnnnnnnnnnnnnnnnnnnnnnnnnnnnnnnnnnnnnnnnnnnnnnnnnnnnnnnnnnnnnnnnnnnnnnnnnnnnnnnnnnnnnnnnnnnnnnnnnnnnnnnnnnnnnnnnnnnnnnnnnnnnnnnnnnnnnnnnnnnnnnnnnnnnnnnnnnnnnnnnnnnnnnnnnnnnnnnnnnnnnnnnnnnnnnnnnnnnnnnnnnnnnnnnnnnnnnnnnnnnnnnnnnnnnnnnnnnnnnnnnnnnnnnnnnnnnnnnnnnnnnnnnnnnnnnnnnnnnnnnnnnnnnnnnnnnnnnnnnnnnnnnnnnnnnnnnnnnnnnnnnnnnnnnnnnnnnnnnnnnnnnnnnnnnnnnnnnnnnnnnnnnnnnnnnnnnnnnnnnnnnnnnnnnnnnnnnnnnnnnnnnnnnnnnnnnnnnnnnnnnnnnnnnnnnnnnnnnnnnnnnnnnnnnnnnnnnnnnnnnnnnnnnnnnnnnnnnnnnnnnnnnnnnnnnnnnnnnnnnnnnnnnnnnnnnnnnnnnnnnnnnnnnnnnnnnnnnnnnnnnnnnnnnnnnnnnnnnnnnnnnnnnnnnnnnnnnnnnnnnnnnnnnnnnnnnnnnnnnnnnnnnnnnnnnnnnnnnnnnnnnnnnnnnnnnnnnnnnnnnnnnnnnnnnnnnnnnnnnnnnnnnnnnnnnnnnnnnnnnnnnnnnnnnnnnnnnnnnnnnnnnnnnnnnnnnnnnnnnnnnnnnnnnnnnnnnnnnnnnnnnnnnnnnnnnnnnnnnnnnnnnnnnnnnnnnnnnnnnnnnnnnnnnnnnnnnnnnnnnnnnnnnnnnnnnnnnnnnnnnnnnnnnnnnnnnnnnnnnnnnnnnnnnnnnnnnnnnnnnnnnnnnnnnnnnnnnnnnnnnnnnnnnnnnnnnnnnnnnnnnnnnnnnnnnnnnnnnnnnnnnnnnnnnnnnnnnnnnnnnnnnnnnnnnnnnnnnnnnnnnnnnnnnnnnnnnnnnnnnnnnnnnnnnnnnnnnnnnnnnnnnnnnnnnnnnnnnnnnnnnnnnnnnnnnnnnnnnnnnnnnnnnnnnnnnnnnnnnnnnnnnnnnnnnnnnnnnnnnnnnnnnnnnnnnnnnnnnnnnnnnnnnnnnnnnnnnnnnnnnnnnnnnnnnnnnnnnnnnnnnnnnnnnnnnnnnnnnnnnnnnnnnnnnnnnnnnnnnnnnnnnnnnnnnnnnnnnnnnnnnnnnnnnnnnnnnnnnnnnnnnnnnnnnnnnnnnnnnnnnnnnnnnnnnnnnnnnnnnnnnnnnnnnnnnnnnnnnnnnnnnnnnnnnnnnnnnnnnnnnnnnnnnnnnnnnnnnnnnnnnnnnnnnnnnnnnnnnnnnnnnnnnnnnnnnnnnnnnnnnnnnnnnnnnnnnnnnnnnnnnnnnnnnnnnnnnnnnnnnnnnnnnnnnnnnnnnnnnnnnnnnnnnnnnnnnnnnnnnnnnnnnnnnnnnnnnnnnnnnnnnnnnnnnnnnnnnnnnnnnnnnnnnnnnnnnnnnnnnnnnnnnnnnnnnnnnnnnnnnnnnnnnnnnnnnnnnnnnnnnnnnnnnnnnnnnnnnnnnnnnnnnnnnnnnnnnnnnnnnnnnnnnnnnnnnnnnnnnnnnnnnnnnnnnnnnnnnnnnnnnnnnnnnnnnnnnnnnnnnnnnnnnnnnnnnnnnnnnnnnnnnnnnnnnnnnnnnnnnnnnnnnnnnnnnnnnnnnnnnnnnnnnnnnnnnnnnnnnnnnnnnnnnnnnnnnnnnnnnnnnnnnnnnnnnnnnnnnnnnnnnnnnnnnnnnnnnnnnnnnnnnnnnnnnnnnnnnnnnnnnnnnnnnnnnnnnnnnnnnnnnnnnnnnnnnnnnnnnnnnnnnnnnnnnnnnnnnnnnnnnnnnnnnnnnnnnnnnnnnnnnnnnnnnnnnnnnnnnnnnnnnnnnnnnnnnnnnnnnnnnnnnnnnnnnnnnnnnnnnnnnnnnnnnnnnnnnnnnnnnnnnnnnnnnnnnnnnnnnnnnnnnnnnnnnnnnnnnnnnnnnnnnnnnnnnnnnnnnnnnnnnnnnnnnnnnnnnnnnnnnnnnnnnnnnnnnnnnnnnnnnnnnnnnnnnnnnnnnnnnnnnnnnnnnnnnnnnnnnnnnnnnnnnnnnnnnnnnnnnnnnnnnnnnnnnnnnnnnnnnnnnnnnnnnnnnnnnnnnnnnnnnnnnnnnnnnnnnnnnnnnnnnnnnnnnnnnnnnnnnnnnnnnnnnnnnnnnnnnnnnnnnnnnnnnnnnnnnnnnnnnnnnnnnnnnnnnnnnnnnnnnnnnnnnnnnnnnnnnnnnnnnnnnnnnnnnnnnnnnnnnnnnnnnnnnnnnnnnnnnnnnnnnnnnnnnnnnnnnnnnnnnnnnnnnnnnnnnnnnnnnnnnnnnnnnnnnnnnnnnnnnnnnnnnnnnnnnnnnnnnnnnnnnnnnnnnnnnnnnnnnnnnnnnnnnnnnnnnnnnnnnnnnnnnnnnnnnnnnnnnnnnnnnnnnnnnnnnnnnnnnnnnnnnnnnnnnnnnnnnnnnnnnnnnnnnnnnnnnnnnnnnnnnnnnnnnnnnnnnnnnnnnnnnnnnnnnnnnnnnnnnnnnnnnnnnnnnnnnnnnnnnnnnnnnnnnnnnnnnnnnnnnnnnnnnnnnnnnnnnnnnnnnnnnnnnnnnnnnnnnnnnnnnnnnnnnnnnnnnnnnnnnnnnnnnnnnnnnnnnnnnnnnnnnnnnnnnnnnnnnnnnnnnnnnnnnnnnnnnnnnnnnnnnnnnnnnnnnnnnnnnnnnnnnnnnnnnnnnnnnnnnnnnnnnnnnnnnnnnnnnnnnnnnnnnnnnnnnnnnnnnnnnnnnnnnnnnnnnnnnnnnnnnnnnnnnnnnnnnnnnnnnnnnnnnnnnnnnnnnnnnnnnnnnnnnnnnnnnnnnnnnnnnnnnnnnnnnnnnnnnnnnnnnnnnnnnnnnnnnnnnnnnnnnnnnnnnnnnnnnnnnnnnnnnnnnnnnnnnnnnnnnnnnnnnnnnnnnnnnnnnnnnnnnnnnnnnnnnnnnnnnnnnnnnnnnnnnnnnnnnnnnnnnnnnnnnnnnnnnnnnnnnnnnnnnnnnnnnnnnnnnnnnnnnnnnnnnnnnnnnnnnnnnnnnnnnnnnnnnnnnnnnnnnnnnnnnnnnnnnnnnnnnnnnnnnnnnnnnnnnnnnnnnnnnnnnnnnnnnnnnnnnnnnnnnnnnnnnnnnnnnnnnnnnnnnnnnnnnnnnnnnnnnnnnnnnnnnnnnnnnnnnnnnnnnnnnnnnnnnnnnnnnnnnnnnnnnnnnnnnnnnnnnnnnnnnnnnnnnnnnnnnnnnnnnnnnnnnnnnnnnnnnnnnnnnnnnnnnnnnnnnnnnnnnnnnnnnnnnnnnnnnnnnnnnnnnnnnnnnnnnnnnnnnnnnnnnnnnnnnnnnnnnnnnnnnnnnnnnnnnnnnnnnnnnnnnnnnnnnnnnnnnnnnnnnnnnnnnnnnnnnnnnnnnnnnnnnnnnnnnnnnnnnnnnnnnnnnnnnnnnnnnnnnnnnnnnnnnnnnnnnnnnnnnnnnnnnnnnnnnnnnnnnnnnnnnnnnnnnnnnnnnnnnnnnnnnnnnnnnnnnnnnnnnnnnnnnnnnnnnnnnnnnnnnnnnnnnnnnnnnnnnnnnnnnnnnnnnnnnnnnnnnnnnnnnnnnnnnnnnnnnnnnnnnnnnnnnnnnnnnnnnnnnnnnnnnnnnnnnnnnnnnnnnnnnnnnnnnnnnnnnnnnnnnnnnnnnnnnnnnnnnnnnnnnnnnnnnnnnnnnnnnnnnnnnnnnnnnnnnnnnnnnnnnnnnnnnnnnnnnnnnnnnnnnnnnnnnnnnnnnnnnnnnnnnnnnnnnnnnnnnnnnnnnnnnnnnnnnnnnnnnnnnnnnnnnnnnnnnnnnnnnnnnnnnnnnnnnnnnnnnnnnnnnnnnnnnnnnnnnnnnnnnnnnnnnnnnnnnnnnnnnnnnnnnnnnnnnnnnnnnnnnnnnnnnnnnnnnnnnnnnnnnnnnnnnnnnnnnnnnnnnnnnnnnnnnnnnnnnnnnnnnnnnnnnnnnnnnnnnnnnnnnnnnnnnnnnnnnnnnnnnnnnnnnnnnnnnnnnnnnnnnnnnnnnnnnnnnnnnnnnnnnnnnnnnnnnnnnnnnnnnnnnnnnnnnnnnnnnnnnnnnnnnnnnnnnnnnnnnnnnnnnnnnnnnnnnnnnnnnnnnnnnnnnnnnnnnnnnnnnnnnnnnnnnnnnnnnnnnnnnnnnnnnnnnnnnnnnnnnnnnnnnnnnnnnnnnnnnnnnnnnnnnnnnnnnnnnnnnnnnnnnnnnnnnnnnnnnnnnnnnnnnnnnnnnnnnnnnnnnnnnnnnnnnnnnnnnnnnnnnnnnnnnnnnnnnnnnnnnnnnnnnnnnnnnnnnnnnnnnnnnnnnnnnnnnnnnnnnnnnnnnnnnnnnnnnnnnnnnnnnnnnnnnnnnnnnnnnnnnnnnnnnnnnnnnnnnnnnnnnnnnnnnnnnnnnnnnnnnnnnnnnnnnnnnnnnnnnnnnnnnnnnnnnnnnnnnnnnnnnnnnnnnnnnnnnnnnnnnnnnnnnnnnnnnnnnnnnnnnnnnnnnnnnnnnnnnnnnnnnnnnnnnnnnnnnnnnnnnnnnnnnnnnnnnnnnnnnnnnnnnnnnnnnnnnnnnnnnnnnnnnnnnnnnnnnnnnnnnnnnnnnnnnnnnnnnnnnnnnnnnnnnnnnnnnnnnnnnnnnnnnnnnnnnnnnnnnnnnnnnnnnnnnnnnnnnnnnnnnnnnnnnnnnnnnnnnnnnnnnnnnnnnnnnnnnnnnnnnnnnnnnnnnnnnnnnnnnnnnnnnnnnnnnnnnnnnnnnnnnnnnnnnnnnnnnnnnnnnnnnnnnnnnnnnnnnnnnnnnnnnnnnnnnnnnnnnnnnnnnnnnnnnnnnnnnnnnnnnnnnnnnnnnnnnnnnnnnnnnnnnnnnnnnnnnnnnnnnnnnnnnnnnnnnnnnnnnnnnnnnnnnnnnnnnnnnnnnnnnnnnnnnnnnnnnnnnnnnnnnnnnnnnnnnnnnnnnnnnnnnnnnnnnnnnnnnnnnnnnnnnnnnnnnnnnnnnnnnnnnnnnnnnnnnnnnnnnnnnnnnnnnnnnnnnnnnnnnnnnnnnnnnnnnnnnnnnnnnnnnnnnnnnnnnnnnnnnnnnnnnnnnnnnnnnnnnnnnnnnnnnnnnnnnnnnnnnnnnnnnnnnnnnnnnnnnnnnnnnnnnnnnnnnnnnnnnnnnnnnnnnnnnnnnnnnnnnnnnnnnnnnnnnnnnnnnnnnnnnnnnnnnnnnnnnnnnnnnnnnnnnnnnnnnnnnnnnnnnnnnnnnnnnnnnnnnnnnnnnnnnnnnnnnnnnnnnnnnnnnnnnnnnnnnnnnnnnnnnnnnnnnnnnnnnnnnnnnnnnnnnnnnnnnnnnnnnnnnnnnnnnnnnnnnnnnnnnnnnnnnnnnnnnnnnnnnnnnnnnnnnnnnnnnnnnnnnnnnnnnnnnnnnnnnnnnnnnnnnnnnnnnnnnnnnnnnnnnnnnnnnnnnnnnnnnnnnnnnnnnnnnnnnnnnnnnnnnnnnnnnnnnnnnnnnnnnnnnnnnnnnnnnnnnnnnnnnnnnnnnnnnnnnnnnnnnnnnnnnnnnnnnnnnnnnnnnnnnnnnnnnnnnnnnnnnnnnnnnnnnnnnnnnnnnnnnnnnnnnnnnnnnnnnnnnnnnnnnnnnnnnnnnnnnnnnnnnnnnnnnnnnnnnnnnnnnnnnnnnnnnnnnnnnnnnnnnnnnnnnnnnnnnnnnnnnnnnnnnnnnnnnnnnnnnnnnnnnnnnnnnnnnnnnnnnnnnnnnnnnnnnnnnnnnnnnnnnnnnnnnnnnnnnnnnnnnnnnnnnnnnnnnnnnnnnnnnnnnnnnnnnnnnnnnnnnnnnnnnnnnnnnnnnnnnnnnnnnnnnnnnnnnnnnnnnnnnnnnnnnnnnnnnnnnnnnnnnnnnnnnnnnnnnnnnnnnnnnnnnnnnnnnnnnnnnnnnnnnnnnnnnnnnnnnnnnnnnnnnnnnnnnnnnnnnnnnnnnnnnnnnnnnnnnnnnnnnnnnnnnnnnnnnnnnnnnnnnnnnnnnnnnnnnnnnnnnnnnnnnnnnnnnnnnnnnnnnnnnnnnnnnnnnnnnnnnnnnnnnnnnnnnnnnnnnnnnnnnnnnnnnnnnnnnnnnnnnnnnnnnnnnnnnnnnnnnnnnnnnnnnnnnnnnnnnnnnnnnnnnnnnnnnnnnnnnnnnnnnnnnnnnnnnnnnnnnnnnnnnnnnnnnnnnnnnnnnnnnnnnnnnnnnnnnnnnnnnnnnnnnnnnnnnnnnnnnnnnnnnnnnnnnnnnnnnnnnnnnnnnnnnnnnnnnnnnnnnnnnnnnnnnnnnnnnnnnnnnnnnnnnnnnnnnnnnnnnnnnnnnnnnnnnnnnnnnnnnnnnnnnnnnnnnnnnnnnnnnnnnnnnnnnnnnnnnnnnnnnnnnnnnnnnnnnnnnnnnnnnnnnnnnnnnnnnnnnnnnnnnnnnnnnnnnnnnnnnnnnnnnnnnnnnnnnnnnnnnnnnnnnnnnnnnnnnnnnnnnnnnnnnnnnnnnnnnnnnnnnnnnnnnnnnnnnnnnnnnnnnnnnnnnnnnnnnnnnnnnnnnnnnnnnnnnnnnnnnnnnnnnnnnnnnnnnnnnnnnnnnnnnnnnnnnnnnnnnnnnnnnnnnnnnnnnnnnnnnnnnnnnnnnnnnnnnnnnnnnnnnnnnnnnnnnnnnnnnnnnnnnnnnnnnnnnnnnnnnnnnnnnnnnnnnnnnnnnnnnnnnnnnnnnnnnnnnnnnnnnnnnnnnnnnnnnnnnnnnnnnnnnnnnnnnnnnnnnnnnnnnnnnnnnnnnnnnnnnnnnnnnnnnnnnnnnnnnnnnnnnnnnnnnnnnnnnnnnnnnnnnnnnnnnnnnnnnnnnnnnnnnnnnnnnnnnnnnnnnnnnnnnnnnnnnnnnnnnnnnnnnnnnnnnnnnnnnnnnnnnnnnnnnnnnnnnnnnnnnnnnnnnnnnnnnnnnnnnnnnnnnnnnnnnnnnnnnnnnnnnnnnnnnnnnnnnnnnnnnnnnnnnnnnnnnnnnnnnnnnnnnnnnnnnnnnnnnnnnnnnnnnnnnnnnnnnnnnnnnnnnnnnnnnnnnnnnnnnnnnnnnnnnnnnnnnnnnnnnnnnnnnnnnnnnnnnnnnnnnnnnnnnnnnnnnnnnnnnnnnnnnnnnnnnnnnnnnnnnnnnnnnnnnnnnnnnnnnnnnnnnnnnnnnnnnnnnnnnnnnnnnnnnnnnnnnnnnnnnnnnnnnnnnnnnnnnnnnnnnnnnnnnnnnnnnnnnnnnnnnnnnnnnnnnnnnnnnnnnnnnnnnnnnnnnnnnnnnnnnnnnnnnnnnnnnnnnnnnnnnnnnnnnnnnnnnnnnnnnnnnnnnnnnnnnnnnnnnnnnnnnnnnnnnnnnnnnnnnnnnnnnnnnnnnnnnnnnnnnnnnnnnnnnnnnnnnnnnnnnnnnnnnnnnnnnnnnnnnnnnnnnnnnnnnnnnnnnnnnnnnnnnnnnnnnnnnnnnnnnnnnnnnnnnnnnnnnnnnnnnnnnnnnnnnnnnnnnnnnnnnnnnnnnnnnnnnnnnnnnnnnnnnnnnnnnnnnnnnnnnnnnnnnnnnnnnnnnnnnnnnnnnnnnnnnnnnnnnnnnnnnnnnnnnnnnnnnnnnnnnnnnnnnnnnnnnnnnnnnnnnnnnnnnnnnnnnnnnnnnnnnnnnnnnnnnnnnnnnnnnnnnnnnnnnnnnnnnnnnnnnnnnnnnnnnnnnnnnnnnnnnnnnnnnnnnnnnnnnnnnnnnnnnnnnnnnnnnnnnnnnnnnnnnnnnnnnnnnnnnnnnnnnnnnnnnnnnnnnnnnnnnnnnnnnnnnnnnnnnnnnnnnnnnnnnnnnnnnnnnnnnnnnnnnnnnnnnnnnnnnnnnnnnnnnnnnnnnnnnnnnnnnnnnnnnnnnnnnnnnnnnnnnnnnnnnnnnnnnnnnnnnnnnnnnnnnnnnnnnnnnnnnnnnnnnnnnnnnnnnnnnnnnnnnnnnnnnnnnnnnnnnnnnnnnnnnnnnnnnnnnnnnnnnnnnnnnnnnnnnnnnnnnnnnnnnnnnnnnnnnnnnnnnnnnnnnnnnnnnnnnnnnnnnnnnnnnnnnnnnnnnnnnnnnnnnnnnnnnnnnnnnnnnnnnnnnnnnnnnnnnnnnnnnnnnnnnnnnnnnnnnnnnnnnnnnnnnnnnnnnnnnnnnnnnnnnnnnnnnnnnnnnnnnnnnnnnnnnnnnnnnnnnnnnnnnnnnnnnnnnnnnnnnnnnnnnnnnnnnnnnnnnnnnnnnnnnnnnnnnnnnnnnnnnnnnnnnnnnnnnnnnnnnnnnnnnnnnnnnnnnnnnnnnnnnnnnnnnnnnnnnnnnnnnnnnnnnnnnnnnnnnnnnnnnnnnnnnnnnnnnnnnnnnnnnnnnnnnnnnnnnnnnnnnnnnnnnnnnnnnnnnnnnnnnnnnnnnnnnnnnnnnnnnnnnnnnnnnnnnnnnnnnnnnnnnnnnnnnnnnnnnnnnnnnnnnnnnnnnnnnnnnnnnnnnnnnnnnnnnnnnnnnnnnnnnnnnnnnnnnnnnnnnnnnnnnnnnnnnnnnnnnnnnnnnnnnnnnnnnnnnnnnnnnnnnnnnnnnnnnnnnnnnnnnnnnnnnnnnnnnnnnnnnnnnnnnnnnnnnnnnnnnnnnnnnnnnnnnnnnnnnnnnnnnnnnnnnnnnnnnnnnnnnnnnnnnnnnnnnnnnnnnnnnnnnnnnnnnnnnnnnnnnnnnnnnnnnnnnnnnnnnnnnnnnnnnnnnnnnnnnnnnnnnnnnnnnnnnnnnnnnnnnnnnnnnnnnnnnnnnnnnnnnnnnnnnnnnnnnnnnnnnnnnnnnnnnnnnnnnnnnnnnnnnnnnnnnnnnnnnnnnnnnnnnnnnnnnnnnnnnnnnnnnnnnnnnnnnnnnnnnnnnnnnnnnnnnnnnnnnnnnnnnnnnnnnnnnnnnnnnnnnnnnnnnnnnnnnnnnnnnnnnnnnnnnnnnnnnnnnnnnnnnnnnnnnnnnnnnnnnnnnnnnnnnnnnnnnnnnnnnnnnnnnnnnnnnnnnnnnnnnnnnnnnnnnnnnnnnnnnnnnnnnnnnnnnnnnnnnnnnnnnnnnnnnnnnnnnnnnnnnnnnnnnnnnnnnnnnnnnnnnnnnnnnnnnnnnnnnnnnnnnnnnnnnnnnnnnnnnnnnnnnnnnnnnnnnnnnnnnnnnnnnnnnnnnnnnnnnnnnnnnnnnnnnnnnnnnnnnnnnnnnnnnnnnnnnnnnnnnnnnnnnnnnnnnnnnnnnnnnnnnnnnnnnnnnnnnnnnnnnnnnnnnnnnnnnnnnnnnnnnnnnnnnnnnnnnnnnnnnnnnnnnnnnnnnnnnnnnnnnnnnnnnnnnnnnnnnnnnnnnnnnnnnnnnnnnnnnnnnnnnnnnnnnnnnnnnnnnnnnnnnnnnnnnnnnnnnnnnnnnnnnnnnnnnnnnnnnnnnnnnnnnnnnnnnnnnnnnnnnnnnnnnnnnnnnnnnnnnnnnnnnnnnnnnnnnnnnnnnnnnnnnnnnnnnnnnnnnnnnnnnnnnnnnnnnnnnnnnnnnnnnnnnnnnnnnnnnnnnnnnnnnnnnnnnnnnnnnnnnnnnnnnnnnnnnnnnnnnnnnnnnnnnnnnnnnnnnnnnnnnnnnnnnnnnnnnnnnnnnnnnnnnnnnnnnnnnnnnnnnnnnnnnnnnnnnnnnnnnnnnnnnnnnnnnnnnnnnnnnnnnnnnnnnnnnnnnnnnnnnnnnnnnnnnnnnnnnnnnnnnnnnnnnnnnnnnnnnnnnnnnnnnnnnnnnnnnnnnnnnnnnnnnnnnnnnnnnnnnnnnnnnnnnnnnnnnnnnnnnnnnnnnnnnnnnnnnnnnnnnnnnnnnnnnnnnnnnnnnnnnnnnnnnnnnnnnnnnnnnnnnnnnnnnnnnnnnnnnnnnnnnnnnnnnnnnnnnnnnnnnnnnnnnnnnnnnnnnnnnnnnnnnnnnnnnnnnnnnnnnnnnnnnnnnnnnnnnnnnnnnnnnnnnnnnnnnnnnnnnnnnnnnnnnnnnnnnnnnnnnnnnnnnnnnnnnnnnnnnnnnnnnnnnnnnnnnnnnnnnnnnnnnnnnnnnnnnnnnnnnnnnnnnnnnnnnnnnnnnnnnnnnnnnnnnnnnnnnnnnnnnnnnnnnnnnnnnnnnnnnnnnnnnnnnnnnnnnnnnnnnnnnnnnnnnnnnnnnnnnnnnnnnnnnnnnnnnnnnnnnnnnnnnnnnnnnnnnnnnnnnnnnnnnnnnnnnnnnnnnnnnnnnnnnnnnnnnnnnnnnnnnnnnnnnnnnnnnnnnnnnnnnnnnnnnnnnnnnnnnnnnnnnnnnnnnnnnnnnnnnnnnnnnnnnnnnnnnnnnnnnnnnnnnnnnnnnnnnnnnnnnnnnnnnnnnnnnnnnnnnnnnnnnnnnnnnnnnnnnnnnnnnnnnnnnnnnnnnnnnnnnnnnnnnnnnnnnnnnnnnnnnnnnnnnnnnnnnnnnnnnnnnnnnnnnnnnnnnnnnnnnnnnnnnnnnnnnnnnnnnnnnnnnnnnnnnnnnnnnnnnnnnnnnnnnnnnnnnnnnnnnnnnnnnnnnnnnnnnnnnnnnnnnnnnnnnnnnnnnnnnnnnnnnnnnnnnnnnnnnnnnnnnnnnnnnnnnnnnnnnnnnnnnnnnnnnnnnnnnnnnnnnnnnnnnnnnnnnnnnnnnnnnnnnnnnnnnnnnnnnnnnnnnnnnnnnnnnnnnnnnnnnnnnnnnnnnnnnnnnnnnnnnnnnnnnnnnnnnnnnnnnnnnnnnnnnnnnnnnnnnnnnnnnnnnnnnnnnnnnnnnnnnnnnnnnnnnnnnnnnnnnnnnnnnnnnnnnnnnnnnnnnnnnnnnnnnnnnnnnnnnnnnnnnnnnnnnnnnnnnnnnnnnnnnnnnnnnnnnnnnnnnnnnnnnnnnnnnnnnnnnnnnnnnnnnnnnnnnnnnnnnnnnnnnnnnnnnnnnnnnnnnnnnnnnnnnnnnnnnnnnnnnnnnnnnnnnnnnnnnnnnnnnnnnnnnnnnnnnnnnnnnnnnnnnnnnnnnnnnnnnnnnnnnnnnnnnnnnnnnnnnnnnnnnnnnnnnnnnnnnnnnnnnnnnnnnnnnnnnnnnnnnnnnnnnnnnnnnnnnnnnnnnnnnnnnnnnnnnnnnnnnnnnnnnnnnnnnnnnnnnnnnnnnnnnnnnnnnnnnnnnnnnnnnnnnnnnnnnnnnnnnnnnnnnnnnnnnnnnnnnnnnnnnnnnnnnnnnnnnnnnnnnnnnnnnnnnnnnnnnnnnnnnnnnnnnnnnnnnnnnnnnnnnnnnnnnnnnnnnnnnnnnnnnnnnnnnnnnnnnnnnnnnnnnnnnnnnnnnnnnnnnnnnnnnnnnnnnnnnnnnnnnnnnnnnnnnnnnnnnnnnnnnnnnnnnnnnnnnnnnnnnnnnnnnnnnnnnnnnnnnnnnnnnnnnnnnnnnnnnnnnnnnnnnnnnnnnnnnnnnnnnnnnnnnnnnnnnnnnnnnnnnnnnnnnnnnnnnnnnnnnnnnnnnnnnnnnnnnnnnnnnnnnnnnnnnnnnnnnnnnnnnnnnnnnnnnnnnnnnnnnnnnnnnnnnnnnnnnnnnnnnnnnnnnnnnnnnnnnnnnnnnnnnnnnnnnnnnnnnnnnnnnnnnnnnnnnnnnnnnnnnnnnnnnnnnnnnnnnnnnnnnnnnnnnnnnnnnnnnnnnnnnnnnnnnnnnnnnnnnnnnnnnnnnnnnnnnnnnnnnnnnnnnnnnnnnnnnnnnnnnnnnnnnnnnnnnnnnnnnnnnnnnnnnnnnnnnnnnnnnnnnnnnnnnnnnnnnnnnnnnnnnnnnnnnnnnnnnnnnnnnnnnnnnnnnnnnnnnnnnnnnnnnnnnnnnnnnnnnnnnnnnnnnnnnnnnnnnnnnnnnnnnnnnnnnnnnnnnnnnnnnnnnnnnnnnnnnnnnnnnnnnnnnnnnnnnnnnnnnnnnnnnnnnnnnnnnnnnnnnnnnnnnnnnnnnnnnnnnnnnnnnnnnnnnnnnnnnnnnnnnnnnnnnnnnnnnnnnnnnnnnnnnnnnnnnnnnnnnnnnnnnnnnnnnnnnnnnnnnnnnnnnnnnnnnnnnnnnnnnnnnnnnnnnnnnnnnnnnnnnnnnnnnnnnnnnnnnnnnnnnnnnnnnnnnnnnnnnnnnnnnnnnnnnnnnnnnnnnnnnnnnnnnnnnnnnnnnnnnnnnnnnnnnnnnnnnnnnnnnnnnnnnnnnnnnnnnnnnnnnnnnnnnnnnnnnnnnnnnnnnnnnnnnnnnnnnnnnnnnnnnnnnnnnnnnnnnnnnnnnnnnnnnnnnnnnnnnnnnnnnnnnnnnnnnnnnnnnnnnnnnnnnnnnnnnnnnnnnnnnnnnnnnnnnnnnnnnnnnnnnnnnnnnnnnnnnnnnnnnnnnnnnnnnnnnnnnnnnnnnnnnnnnnnnnnnnnnnnnnnnnnnnnnnnnnnnnnnnnnnnnnnnnnnnnnnnnnnnnnnnnnnnnnnnnnnnnnnnnnnnnnnnnnnnnnnnnnnnnnnnnnnnnnnnnnnnnnnnnnnnnnnnnnnnnnnnnnnnnnnnnnnnnnnnnnnnnnnnnnnnnnnnnnnnnnnnnnnnnnnnnnnnnnnnnnnnnnnnnnnnnnnnnnnnnnnnnnnnnnnnnnnnnnnnnnnnnnnnnnnnnnnnnnnnnnnnnnnnnnnnnnnnnnnnnnnnnnnnnnnnnnnnnnnnnnnnnnnnnnnnnnnnnnnnnnnnnnnnnnnnnnnnnnnnnnnnnnnnnnnnnnnnnnnnnnnnnnnnnnnnnnnnnnnnnnnnnnnnnnnnnnnnnnnnnnnnnnnnnnnnnnnnnnnnnnnnnnnnnnnnnnnnnnnnnnnnnnnnnnnnnnnnnnnnnnnnnnnnnnnnnnnnnnnnnnnnnnnnnnnnnnnnnnnnnnnnnnnnnnnnnnnnnnnnnnnnnnnnnnnnnnnnnnnnnnnnnnnnnnnnnnnnnnnnnnnnnnnnnnnnnnnnnnnnnnnnnnnnnnnnnnnnnnnnnnnnnnnnnnnnnnnnnnnnnnnnnnnnnnnnnnnnnnnnnnnnnnnnnnnnnnnnnnnnnnnnnnnnnnnnnnnnnnnnnnnnnnnnnnnnnnnnnnnnnnnnnnnnnnnnnnnnnnnnnnnnnnnnnnnnnnnnnnnnnnnnnnnnnnnnnnnnnnnnnnnnnnnnnnnnnnnnnnnnnnnnnnnnnnnnnnnnnnnnnnnnnnnnnnnnnnnnnnnnnnnnnnnnnnnnnnnnnnnnnnnnnnnnnnnnnnnnnnnnnnnnnnnnnnnnnnnnnnnnnnnnnnnnnnnnnnnnnnnnnnnnnnnnnnnnnnnnnnnnnnnnnnnnnnnnnnnnnnnnnnnnnnnnnnnnnnnnnnnnnnnnnnnnnnnnnnnnnnnnnnnnnnnnnnnnnnnnnnnnnnnnnnnnnnnnnnnnnnnnnnnnnnnnnnnnnnnnnnnnnnnnnnnnnnnnnnnnnnnnnnnnnnnnnnnnnnnnnnnnnnnnnnnnnnnnnnnnnnnnnnnnnnnnnnnnnnnnnnnnnnnnnnnnnnnnnnnnnnnnnnnnnnnnnnnnnnnnnnnnnnnnnnnnnnnnnnnnnnnnnnnnnnnnnnnnnnnnnnnnnnnnnnnnnnnnnnnnnnnnnnnnnnnnnnnnnnnnnnnnnnnnnnnnnnnnnnnnnnnnnnnnnnnnnnnnnnnnnnnnnnnnnnnnnnnnnnnnnnnnnnnnnnnnnnnnnnnnnnnnnnnnnnnnnnnnnnnnnnnnnnnnnnnnnnnnnnnnnnnnnnnnnnnnnnnnnnnnnnnnnnnnnnnnnnnnnnnnnnnnnnnnnnnnnnnnnnnnnnnnnnnnnnnnnnnnnnnnnnnnnnnnnnnnnnnnnnnnnnnnnnnnnnnnnnnnnnnnnnnnnnnnnnnnnnnnnnnnnnnnnnnnnnnnnnnnnnnnnnnnnnnnnnnnnnnnnnnnnnnnnnnnnnnnnnnnnnnnnnnnnnnnnnnnnnnnnnnnnnnnnnnnnnnnnnnnnnnnnnnnnnnnnnnnnnnnnnnnnnnnnnnnnnnnnnnnnnnnnnnnnnnnnnnnnnnnnnnnnnnnnnnnnnnnnnnnnnnnnnnnnnnnnnnnnnnnnnnnnnnnnnnnnnnnnnnnnnnnnnnnnnnnnnnnnnnnnnnnnnnnnnnnnnnnnnnnnnnnnnnnnnnnnnnnnnnnnnnnnnnnnnnnnnnnnnnnnnnnnnnnnnnnnnnnnnnnnnnnnnnnnnnnnnnnnnnnnnnnnnnnnnnnnnnnnnnnnnnnnnnnnnnnnnnnnnnnnnnnnnnnnnnnnnnnnnnnnnnnnnnnnnnnnnnnnnnnnnnnnnnnnnnnnnnnnnnnnnnnnnnnnnnnnnnnnnnnnnnnnnnnnnnnnnnnnnnnnnnnnnnnnnnnnnnnnnnnnnnnnnnnnnnnnnnnnnnnnnnnnnnnnnnnnnnnnnnnnnnnnnnnnnnnnnnnnnnnnnnnnnnnnnnnnnnnnnnnnnnnnnnnnnnnnnnnnnnnnnnnnnnnnnnnnnnnnnnnnnnnnnnnnnnnnnnnnnnnnnnnnnnnnnnnnnnnnnnnnnnnnnnnnnnnnnnnnnnnnnnnnnnnnnnnnnnnnnnnnnnnnnnnnnnnnnnnnnnnnnnnnnnnnnnnnnnnnnnnnnnnnnnnnnnnnnnnnnnnnnnnnnnnnnnnnnnnnnnnnnnnnnnnnnnnnnnnnnnnnnnnnnnnnnnnnnnnnnnnnnnnnnnnnnnnnnnnnnnnnnnnnnnnnnnnnnnnnnnnnnnnnnnnnnnnnnnnnnnnnnnnnnnnnnnnnnnnnnnnnnnnnnnnnnnnnnnnnnnnnnnnnnnnnnnnnnnnnnnnnnnnnnnnnnnnnnnnnnnnnnnnnnnnnnnnnnnnnnnnnnnnnnnnnnnnnnnnnnnnnnnnnnnnnnnnnnnnnnnnnnnnnnnnnnnnnnnnnnnnnnnnnnnnnnnnnnnnnnnnnnnnnnnnnnnnnnnnnnnnnnnnnnnnnnnnnnnnnnnnnnnnnnnnnnnnnnnnnnnnnnnnnnnnnnnnnnnnnnnnnnnnnnnnnnnnnnnnnnnnnnnnnnnnnnnnnnnnnnnnnnnnnnnnnnnnnnnnnnnnnnnnnnnnnnnnnnnnnnnnnnnnnnnnnnnnnnnnnnnnnnnnnnnnnnnnnnnnnnnnnnnnnnnnnnnnnnnnnnnnnnnnnnnnnnnnnnnnnnnnnnnnnnnnnnnnnnnnnnnnnnnnnnnnnnnnnnnnnnnnnnnnnnnnnnnnnnnnnnnnnnnnnnnnnnnnnnnnnnnnnnnnnnnnnnnnnnnnnnnnnnnnnnnnnnnnnnnnnnnnnnnnnnnnnnnnnnnnnnnnnnnnnnnnnnnnnnnnnnnnnnnnnnnnnnnnnnnnnnnnnnnnnnnnnnnnnnnnnnnnnnnnnnnnnnnnnnnnnnnnnnnnnnnnnnnnnnnnnnnnnnnnnnnnnnnnnnnnnnnnnnnnnnnnnnnnnnnnnnnnnnnnnnnnnnnnnnnnnnnnnnnnnnnnnnnnnnnnnnnnnnnnnnnnnnnnnnnnnnnnnnnnnnnnnnnnnnnnnnnnnnnnnnnnnnnnnnnnnnnnnnnnnnnnnnnnnnnnnnnnnnnnnnnnnnnnnnnnnnnnnnnnnnnnnnnnnnnnnnnnnnnnnnnnnnnnnnnnnnnnnnnnnnnnnnnnnnnnnnnnnnnnnnnnnnnnnnnnnnnnnnnnnnnnnnnnnnnnnnnnnnnnnnnnnnnnnnnnnnnnnnnnnnnnnnnnnnnnnnnnnnnnnnnnnnnnnnnnnnnnnnnnnnnnnnnnnnnnnnnnnnnnnnnnnnnnnnnnnnnnnnnnnnnnnnnnnnnnnnnnnnnnnnnnnnnnnnnnnnnnnnnnnnnnnnnnnnnnnnnnnnnnnnnnnnnnnnnnnnnnnnnnnnnnnnnnnnnnnnnnnnnnnnnnnnnnnnnnnnnnnnnnnnnnnnnnnnnnnnnnnnnnnnnnnnnnnnnnnnnnnnnnnnnnnnnnnnnnnnnnnnnnnnnnnnnnnnnnnnnnnnnnnnnnnnnnnnnnnnnnnnnnnnnnnnnnnnnnnnnnnnnnnnnnnnnnnnnnnnnnnnnnnnnnnnnnnnnnnnnnnnnnnnnnnnnnnnnnnnnnnnnnnnnnnnnnnnnnnnnnnnnnnnnnnnnnnnnnnnnnnnnnnnnnnnnnnnnnnnnnnnnnnnnnnnnnnnnnnnnnnnnnnnnnnnnnnnnnnnnnnnnnnnnnnnnnnnnnnnnnnnnnnnnnnnnnnnnnnnnnnnnnnnnnnnnnnnnnnnnnnnnnnnnnnnnnnnnnnnnnnnnnnnnnnnnnnnnnnnnnnnnnnnnnnnnnnnnnnnnnnnnnnnnnnnnnnnnnnnnnnnnnnnnnnnnnnnnnnnnnnnnnnnnnnnnnnnnnnnnnnnnnnnnnnnnnnnnnnnnnnnnnnnnnnnnnnnnnnnnnnnnnnnnnnnnnnnnnnnnnnnnnnnnnnnnnnnnnnnnnnnnnnnnnnnnnnnnnnnnnnnnnnnnnnnnnnnnnnnnnnnnnnnnnnnnnnnnnnnnnnnnnnnnnnnnnnnnnnnnnnnnnnnnnnnnnnnnnnnnnnnnnnnnnnnnnnnnnnnnnnnnnnnnnnnnnnnnnnnnnnnnnnnnnnnnnnnnnnnnnnnnnnnnnnnnnnnnnnnnnnnnnnnnnnnnnnnnnnnnnnnnnnnnnnnnnnnnnnnnnnnnnnnnnnnnnnnnnnnnnnnnnnnnnnnnnnnnnnnnnnnnnnnnnnnnnnnnnnnnnnnnnnnnnnnnnnnnnnnnnnnnnnnnnnnnnnnnnnnnnnnnnnnnnnnnnnnnnnnnnnnnnnnnnnnnnnnnnnnnnnnnnnnnnnnnnnnnnnnnnnnnnnnnnnnnnnnnnnnnnnnnnnnnnnnnnnnnnnnnnnnnnnnnnnnnnnnnnnnnnnnnnnnnnnnnnnnnnnnnnnnnnnnnnnnnnnnnnnnnnnnnnnnnnnnnnnnnnnnnnnnnnnnnnnnnnnnnnnnnnnnnnnnnnnnnnnnnnnnnnnnnnnnnnnnnnnnnnnnnnnnnnnnnnnnnnnnnnnnnnnnnnnnnnnnnnnnnnnnnnnnnnnnnnnnnnnnnnnnnnnnnnnnnnnnnnnnnnnnnnnnnnnnnnnnnnnnnnnnnnnnnnnnnnnnnnnnnnnnnnnnnnnnnnnnnnnnnnnnnnnnnnnnnnnnnnnnnnnnnnnnnnnnnnnnnnnnnnnnnnnnnnnnnnnnnnnnnnnnnnnnnnnnnnnnnnnnnnnnnnnnnnnnnnnnnnnnnnnnnnnnnnnnnnnnnnnnnnnnnnnnnnnnnnnnnnnnnnnnnnnnnnnnnnnnnnnnnnnnnnnnnnnnnnnnnnnnnnnnnnnnnnnnnnntgccacccgcctcttgcccaggcaaggaggaagccgtggagtacaacctgctcgaagaaaagtggattcccgttctgtggaaagatgggcacagcggtcgcgtgggcattagtgaggcccttaggcaagcaggccggattcgccaaatcgcggccagcaacccaatggaccgcctggccatcctgcgtttcctgcttgcgttgctctattggtgcaaagggaatcccccggacgacaagaactcgatttcttcgtttccctctgattggttcaagaaactcgatgacaacaaagactgtttcaaccttcagggcgatgggaagcggttttaccaacgcaagcctaaccgacttgagaagaagctgtccgtcaactatctgatgcaagaagtgccgaccggcacaaacttctggcacttccggcatgggacagatttcagaaacggcttatgtccggcatgctgcgcaatgggcttgttgcgccttccgctctttgctacgtcggccgggcgcggcaagcccccgggcgtcaatcaaaaaccgccgatctacatcgtgccgatgggcgactgcctttccgaaaccctgcgcctctcatggcggaagacgtcggagatgaacctgggcacgcccacatgggaaaatccggacataagcctccctcaacacggcaatgttccattattgataggattaacgtgggtaccgcggcgcgtctggttagacactccggagacaccagagtccaactgcatcgcctgcgggcgcagggaggctctgatacgtcaatgtgtctttgcgggtattgggagcacaaagacaggcgaaggcagtctggcacgaatctggaacgacccgcacaccatcagcgaaggcgacgagattgtgaagcctttcagcgcgcttggcccggccgacgctgcggctgggaagtggacgaaggtcgtggcgggaatcctgtgcggggaaaagccgaaggggaacagtaagttgtgggtcgtcagctttgcgacagtgcagaacgacaaatacctggaagcagccgagcgggagattcaattcttggccgcgctcgacgacgtgaaggttcaggcgagtttgcaagaaatccaggcgtggcagaaggaaggctggaagctcgttggcagagccaaaccgcgagagacttcacgaaacagaggacaccttgaaattctctccgcagtcgccgctgttcgtccccaagccgaggcaacggtttccggaaaaatcgacgagatgatcgcagaaggcggtaaggcatgggaagaggcggcccaggaatatcgtccgttgatggccgccgtcgccaaatcgctttccccgggctacacaaccgcttccctccggaggcgacaagaaattgccgctgtaaagccggacatgcggccaaagagaaacaacaaagacgaagggggggacaagtgactccaacggagcagtacgtcgaagttctgactcgactgaaacccggtgagctcgggctcttgcgcaaccatgccgggcaagggctcgacgaatcggtagagggctttgaccttttcgcaggcctttggtggccgctgcgggcgcaaacccaacgggcgcctcgccgtgaggtggcctggcttgtcgccaaactctacgccctccggcccctcgagcattcaccccgcgagaccctcgctcgccagctcgggcgatcccggccgggcgagaaaacagcgcggcagcgtttcgagcaacgcttcgacaggatgctcacgctgccgcttgctgaaatcgaacccgccctacagtgggcaatcgacctcatagcttccaagcacctcgaactcgactgggtgcggctgacgaacgatctttccatctgggaacgcgaatccacccggctcaaatgggccgaggaatttttgaactgtccaagaggaggagagtcatgttgatccagattcacgccattcagaatcacagcccggccaacctgaaccgggatgacctgggcgcgcccaagacttgcttttttggcggagtcttgcgctcccgtatttccagccagtgccttaagcgcagcatccgcatgagtgaggagttcagacaattgctgggcggagttcgcacccgccagttggcgaaagagattgcggaaaaggtgacgggcaaagacgtcaggaagcgagcggagaacattctcaaagcctgcgggctggagcctaagaaagcaaaaaaacaggaaggagaagacgaacaggaaagtgctgagaggagcaagatgctggtttacaccacccaagaggcgattacacgcatggccgaactcctccagcagggcgacggaaaaacggacgaggccttggcagcggagttcggcaagctcatcagtgaatccgtcgccgtgccggacatggcgctgagcggcaggatgcttgaaacgggagtcctcaaagacacgacggttgaggcatcgcttcaagtcgcccatgccatttccacccatgaggcccggcccgaggtggactactatgtcgccgccgatgatgtccccggcgaggacgcgggcgcaggttacgtggatgaagccatgttcggttcggcatgtttctacaagtatttctccattcattgggaaacgctggtcaaaaacctgaagcccttcgggacgaatcacgaaaaactggcggcccataccgtcggcgccttcattcgcgccgcggccttggccaaccccacgggaaaacaaaatagttttgccgcgcacaaccctcctgacgggatgttggtggaagtcagaaacactcccatcagctacgccaacgccttcgccaaaccggcggctcctcagggcgaacgggacatcatctcgcagagcgtggcgcagcttgcccattatgtgaacgacatagatacgggatacggcaagccgacgaagcggttctggttctctccaaatctccgctatccgttgacggctaccaccacggagagcgaagacggaaaacagaaacagcgtgaggtcccgcttgccgacaaagatgttaagtctcttgacgaactgatagcggctgtactcaaggaaatcggttacgactggcaggaggccaagaaagtggtcctgaatccggaggtgccccatgagcgcaaagacgctgctacttcggcttgaaggtcctcttcaggcatggggcgatcagcaatccaagttcgtcattcggcgcacggccgaggcgccgaccaagtccggcgtcatcgggatgctttgcgcggcattgggcgtttcccggccagaggcccgcgaaggctggcttccaaggctggcccggctgcgcatgggcgtacgcgtcgatgcgccaggggtccgctggtgggattatcacacggtgggtgcggggatgccgatgcgtaccgccgaggggggaaccaagtccggagccatgctcacccgccgcgaatacctttgcgacgcctcgtttctcgtcgctcttcagggcgaaccggacctcattgaggaactggaggcggcaatcaaagcgcccaagtggacactctacctcggcagaaagtgctgccccccttgccgccctctgctggagcatccgggaggtgaattccccgacttgctttctgccctcgaatcggtcccctggcgtcggcggctgaaggacgatccccagccgcgacccgtcgattgcctgcttgattgggaacccaccaacgagcagcccgaggcgcccgatgatgcgctcgtctggtacgacgtgccgttgacattcgagccgccgtcgcaccaaccccgattcgtcatccgcaggcagttgcgcgtcggagcggacggcgacgtaacacttgcggtgcagccaccgcagagcgacacgccaccgcctccgcgcccaagagcggattacacgaacacagagtacaaaaaccgacgcaaggagcggctcgacgacgactatcacttgtgcgttttttgcaagtctcccgccagcaccgtgcagcacatcacgtaccgccgcgcgggcggcggcgaactccgggacgatttgcgctccctctgccgcctctgccacgacgccgtgaccatgatcgagtacgggctcggaatgggcttggaccgcatcaaccccgaagagccccgttggcgcgacaagatcatcgagaagcgggaagagattatcaggttccgctctctggagactcgccgcagacgccttgccgctgaggaggtggaatagccatgtacctctcctgcctcttgattgacgtcggcaccaaccccgaccgccccaggcccgggcggctctggctgcgaaacctccatcacgtccaccagcgcctttgcatggcgtttccatccaaagaccgaatatcccacgatccccacttcctcaagcctttcaaacccgcggactttgccaacaaccaggtccatgtaagacgtgacggcgactccggctttctcttccgcatcgacccgcaaccgggcgggcgggtcgtgatcctcgtccagtctaactctgccgtaaagcctgactggggctacgccttccacaacgcccgttttcttctgaatcctctagccgctccccctcaggtgcaggaattcgacccccgctttgagaagggtcagcggcttcgcttccgtatccgcgccaatctgagtaagaagataaaaaccagcacagagggcgttgatcttacgaggacgcgagaggggacagataagcggggccgcccgaaggcccaaggcaaacgcgtggcgctgacctgggacaaggaccagaaccgcgacgatgtgatacgaaaatggttcgccggcaagggcggccaaggtggattccaagtggaaactttccgggtcttgcagatcgggtggggcgcaggagaccgatccgacccgaggccgacgggcggccgcatgaaatttcgctcggcgttattggaggggacgcttacggttgaggacgcggacagcttcagagaaaccatcgtgggcggcgttgggcacggcaaagccttcggcttcggcctgctttccgtggcgccgctctcgctgtagcggcggtctccgaccgccggtacgtcgatcggagatcgacgctacaatcccttgtcgatcggggatccgtgcaacatttcttgagcggagatcgagccaatatgaaattcaaaccccgcttgcggcgactggactggctctatacgggcagcccaatctactatctcacgctgtgtacgcaggaccgcaaacgctcgttggcaaatcctgcgattcaccgggaattcacgagattctccgaacgggcgagcgattttcttgtttgggtcgggttcttcatgatcatgcctgatcacatccatcttttcgccggcttttgtcgtgagtccccacctttagggaaatggatcaaggcgctgcgcggggatttatccaaagtcctccgggaagatgagggcgagggcacacattgggagaaagactttttcgatcacgtcctgagatcgcaagaatcctatcgggagaaatatgaatatgtccggcagaatccggtccgggccggtttagtcaagcgcccggaagattggccgtaccagggtgagatccatcgcctggttttgtagcggcggtctccgaccgccgtaacgtcgatcggagatcgactacaaccccggtcgatcggagatcgacgctacaaccgccgtcgatcggagatcgacgctacagcacgggctggaggctctgtgagaattcaagatctccacgttctacccaagttcagtgacgggtggagttatctgtacgtcgagcattgccacgtcgatcaggaagagcgggccattgccgtccacgatcaagccgggaaggtgccggtcccctgtgccaatctggctctcctgatgttgggtccgggcgtctcgattactcacgccgccatctccgtgttggcggaccatgggtgcctggtggcttggtgcggggaggagggagtccgcttctacgccgtgggcatgggcgagacgcgcaacgcggccaacttcctgcatcaggcgaggctgtgggcggaccagggtttccatatgcaggtggtgcgccgcctctatcagttgcgattttcggagaagttcgaccctgccctgaccctccagcaaatccgcggcatggagggcgtgcgggtgcgcgatgcctacgccaaggccgcccaggaagccggcatcacgtggtcgggccgcagctataaacgcgatgagtggagcaaggcggaccctgccaaccgagccttgtccgccgctaactcctgcctatatggaatctgccatgctgccatcgtgtcagcaggtttttcgcccgcactcgggtttatccacaccggcaagatgctgtccttcgtctacgatctcgccgacctgtacaaggctgaaattaccgttccagtggcatttcgcgccgccgccgaggggacgggacagttggaacgccgggtgcgcatcacctgccgcgatcagttcgtatccacgcggcttctggagagaatcatcccggatgtccaaagggcgttgatgctggcaaaagcgacggcctgggacactaccttcgacctggatgccgccgcccccggcttcctctgggacaatctggaaggagaggtcgaaggcggccgcctgctagcccccgaaatcggtgaaacggagcccggcgatggtggtcctgattcttgagcgcgtccccccagggttgcgaggcgagctgactcgctggtttttggaacctcaggcgggagtgttcgtgggacgcgtctccgccatggtccgtgatcggctctgggaaaaagcctgcagccaggccaagggaggcgggtgcttgattatctattcaagcgacaatgaacagggctttcgagtccgaacctggggccaaacagctcgggtcatcgatgacttcgagggcctttttctcgttcgcatgccgcagaatcaataatttagtaagtgttgtccccacgcgcgtgggggtgaaccgccggggctgaaggtttcatgggctggaaagaagttgtccccacgcgcgtgggggtgaaccgatatgctgcatgtgccggggctggcgcttgatgttgtccccacgcgcgtgggggtgaaccggtatcggcgagtggcaaggcgaatccacttaggttgtccccacgcgcgtgggggtgaaccgacctccgagggcgcggggcgcgtgctggcgatgttgtccccacgcgcgtgggggtgaaccggctggggccgacgcgcgcttgtgagactgcgggttgtccccacgcgcgtgggggtgaaccgcgggagaactttgaaggcacggtcctcgatcacgttgtccccacgcgcgtgggggtgaaccggcgcaggttaaggctgaggccaaggccgatgcgttgtccccacgcgcgtgggggtgaaccgtaatggtggcttgcaccttctgctcgaccgatgttgtccccacgcgcgtgggggtgaaccgcagcgggccgtgttggaggagaaggtcgcggagttgtccccacgcgcgtgggggtgaaccgttcccagccgcaggcaggatcaccgtaccccagttgtccccacgcgcgtgggggtgaaccgcaaaacaatatcaagaccaagcacttggatgtgttgtccccacgcgcgtgggggtgaaccgcatcgggcagcacagcggccttataccccaaagttgtccccacgcgcgtgggggtgaaccggcagctcgcggcgattcgcattgccgctgaaagttgtccccacgcgcgtgggggtgaaccggggagtcgtgagtgtagttacaggcagggttcgttgtccccacgcgcgtgggggtgaaccgcttctgcatcttataaagaacgccagtttgaagttgtccccacgcgcgtgggggtgaaccggtacggttcccaggggaattatttcttggggtgttgtccccacgcgcgtgggggtgaaccgatgtagcttgatatgggtgtggtgtcgcagaagttgtccccacgcgcgtgggggtgaaccggcggcgcgcacattccaacctcgtccgtatccgttgtccccacgcgcgtgggggtgaaccggcgg

SEQ ID NO: 1092 - DNA, 103369 bp, Artificial Sequence
  Synthetic Oligonucleotide
  misc_feature (1)..(95407): n is a, c, g, or t
nnnnnnnnnnnnnnnnnnnnnnnnnnnnnnnnnnnnnnnnnnnnnnnnnnnnnnnnnnnnnnnnnnnnnnnnnnnnnnnnnnnnnnnnnnnnnnnnnnnnnnnnnnnnnnnnnnnnnnnnnnnnnnnnnnnnnnnnnnnnnnnnnnnnnnnnnnnnnnnnnnnnnnnnnnnnnnnnnnnnnnnnnnnnnnnnnnnnnnnnnnnnnnnnnnnnnnnnnnnnnnnnnnnnnnnnnnnnnnnnnnnnnnnnnnnnnnnnnnnnnnnnnnnnnnnnnnnnnnnnnnnnnnnnnnnnnnnnnnnnnnnnnnnnnnnnnnnnnnnnnnnnnnnnnnnnnnnnnnnnnnnnnnnnnnnnnnnnnnnnnnnnnnnnnnnnnnnnnnnnnnnnnnnnnnnnnnnnnnnnnnnnnnnnnnnnnnnnnnnnnnnnnnnnnnnnnnnnnnnnnnnnnnnnnnnnnnnnnnnnnnnnnnnnnnnnnnnnnnnnnnnnnnnnnnnnnnnnnnnnnnnnnnnnnnnnnnnnnnnnnnnnnnnnnnnnnnnnnnnnnnnnnnnnnnnnnnnnnnnnnnnnnnnnnnnnnnnnnnnnnnnnnnnnnnnnnnnnnnnnnnnnnnnnnnnnnnnnnnnnnnnnnnnnnnnnnnnnnnnnnnnnnnnnnnnnnnnnnnnnnnnnnnnnnnnnnnnnnnnnnnnnnnnnnnnnnnnnnnnnnnnnnnnnnnnnnnnnnnnnnnnnnnnnnnnnnnnnnnnnnnnnnnnnnnnnnnnnnnnnnnnnnnnnnnnnnnnnnnnnnnnnnnnnnnnnnnnnnnnnnnnnnnnnnnnnnnnnnnnnnnnnnnnnnnnnnnnnnnnnnnnnnnnnnnnnnnnnnnnnnnnnnnnnnnnnnnnnnnnnnnnnnnnnnnnnnnnnnnnnnnnnnnnnnnnnnnnnnnnnnnnnnnnnnnnnnnnnnnnnnnnnnnnnnnnnnnnnnnnnnnnnnnnnnnnnnnnnnnnnnnnnnnnnnnnnnnnnnnnnnnnnnnnnnnnnnnnnnnnnnnnnnnnnnnnnnnnnnnnnnnnnnnnnnnnnnnnnnnnnnnnnnnnnnnnnnnnnnnnnnnnnnnnnnnnnnnnnnnnnnnnnnnnnnnnnnnnnnnnnnnnnnnnnnnnnnnnnnnnnnnnnnnnnnnnnnnnnnnnnnnnnnnnnnnnnnnnnnnnnnnnnnnnnnnnnnnnnnnnnnnnnnnnnnnnnnnnnnnnnnnnnnnnnnnnnnnnnnnnnnnnnnnnnnnnnnnnnnnnnnnnnnnnnnnnnnnnnnnnnnnnnnnnnnnnnnnnnnnnnnnnnnnnnnnnnnnnnnnnnnnnnnnnnnnnnnnnnnnnnnnnnnnnnnnnnnnnnnnnnnnnnnnnnnnnnnnnnnnnnnnnnnnnnnnnnnnnnnnnnnnnnnnnnnnnnnnnnnnnnnnnnnnnnnnnnnnnnnnnnnnnnnnnnnnnnnnnnnnnnnnnnnnnnnnnnnnnnnnnnnnnnnnnnnnnnnnnnnnnnnnnnnnnnnnnnnnnnnnnnnnnnnnnnnnnnnnnnnnnnnnnnnnnnnnnnnnnnnnnnnnnnnnnnnnnnnnnnnnnnnnnnnnnnnnnnnnnnnnnnnnnnnnnnnnnnnnnnnnnnnnnnnnnnnnnnnnnnnnnnnnnnnnnnnnnnnnnnnnnnnnnnnnnnnnnnnnnnnnnnnnnnnnnnnnnnnnnnnnnnnnnnnnnnnnnnnnnnnnnnnnnnnnnnnnnnnnnnnnnnnnnnnnnnnnnnnnnnnnnnnnnnnnnnnnnnnnnnnnnnnnnnnnnnnnnnnnnnnnnnnnnnnnnnnnnnnnnnnnnnnnnnnnnnnnnnnnnnnnnnnnnnnnnnnnnnnnnnnnnnnnnnnnnnnnnnnnnnnnnnnnnnnnnnnnnnnnnnnnnnnnnnnnnnnnnnnnnnnnnnnnnnnnnnnnnnnnnnnnnnnnnnnnnnnnnnnnnnnnnnnnnnnnnnnnnnnnnnnnnnnnnnnnnnnnnnnnnnnnnnnnnnnnnnnnnnnnnnnnnnnnnnnnnnnnnnnnnnnnnnnnnnnnnnnnnnnnnnnnnnnnnnnnnnnnnnnnnnnnnnnnnnnnnnnnnnnnnnnnnnnnnnnnnnnnnnnnnnnnnnnnnnnnnnnnnnnnnnnnnnnnnnnnnnnnnnnnnnnnnnnnnnnnnnnnnnnnnnnnnnnnnnnnnnnnnnnnnnnnnnnnnnnnnnnnnnnnnnnnnnnnnnnnnnnnnnnnnnnnnnnnnnnnnnnnnnnnnnnnnnnnnnnnnnnnnnnnnnnnnnnnnnnnnnnnnnnnnnnnnnnnnnnnnnnnnnnnnnnnnnnnnnnnnnnnnnnnnnnnnnnnnnnnnnnnnnnnnnnnnnnnnnnnnnnnnnnnnnnnnnnnnnnnnnnnnnnnnnnnnnnnnnnnnnnnnnnnnnnnnnnnnnnnnnnnnnnnnnnnnnnnnnnnnnnnnnnnnnnnnnnnnnnnnnnnnnnnnnnnnnnnnnnnnnnnnnnnnnnnnnnnnnnnnnnnnnnnnnnnnnnnnnnnnnnnnnnnnnnnnnnnnnnnnnnnnnnnnnnnnnnnnnnnnnnnnnnnnnnnnnnnnnnnnnnnnnnnnnnnnnnnnnnnnnnnnnnnnnnnnnnnnnnnnnnnnnnnnnnnnnnnnnnnnnnnnnnnnnnnnnnnnnnnnnnnnnnnnnnnnnnnnnnnnnnnnnnnnnnnnnnnnnnnnnnnnnnnnnnnnnnnnnnnnnnnnnnnnnnnnnnnnnnnnnnnnnnnnnnnnnnnnnnnnnnnnnnnnnnnnnnnnnnnnnnnnnnnnnnnnnnnnnnnnnnnnnnnnnnnnnnnnnnnnnnnnnnnnnnnnnnnnnnnnnnnnnnnnnnnnnnnnnnnnnnnnnnnnnnnnnnnnnnnnnnnnnnnnnnnnnnnnnnnnnnnnnnnnnnnnnnnnnnnnnnnnnnnnnnnnnnnnnnnnnnnnnnnnnnnnnnnnnnnnnnnnnnnnnnnnnnnnnnnnnnnnnnnnnnnnnnnnnnnnnnnnnnnnnnnnnnnnnnnnnnnnnnnnnnnnnnnnnnnnnnnnnnnnnnnnnnnnnnnnnnnnnnnnnnnnnnnnnnnnnnnnnnnnnnnnnnnnnnnnnnnnnnnnnnnnnnnnnnnnnnnnnnnnnnnnnnnnnnnnnnnnnnnnnnnnnnnnnnnnnnnnnnnnnnnnnnnnnnnnnnnnnnnnnnnnnnnnnnnnnnnnnnnnnnnnnnnnnnnnnnnnnnnnnnnnnnnnnnnnnnnnnnnnnnnnnnnnnnnnnnnnnnnnnnnnnnnnnnnnnnnnnnnnnnnnnnnnnnnnnnnnnnnnnnnnnnnnnnnnnnnnnnnnnnnnnnnnnnnnnnnnnnnnnnnnnnnnnnnnnnnnnnnnnnnnnnnnnnnnnnnnnnnnnnnnnnnnnnnnnnnnnnnnnnnnnnnnnnnnnnnnnnnnnnnnnnnnnnnnnnnnnnnnnnnnnnnnnnnnnnnnnnnnnnnnnnnnnnnnnnnnnnnnnnnnnnnnnnnnnnnnnnnnnnnnnnnnnnnnnnnnnnnnnnnnnnnnnnnnnnnnnnnnnnnnnnnnnnnnnnnnnnnnnnnnnnnnnnnnnnnnnnnnnnnnnnnnnnnnnnnnnnnnnnnnnnnnnnnnnnnnnnnnnnnnnnnnnnnnnnnnnnnnnnnnnnnnnnnnnnnnnnnnnnnnnnnnnnnnnnnnnnnnnnnnnnnnnnnnnnnnnnnnnnnnnnnnnnnnnnnnnnnnnnnnnnnnnnnnnnnnnnnnnnnnnnnnnnnnnnnnnnnnnnnnnnnnnnnnnnnnnnnnnnnnnnnnnnnnnnnnnnnnnnnnnnnnnnnnnnnnnnnnnnnnnnnnnnnnnnnnnnnnnnnnnnnnnnnnnnnnnnnnnnnnnnnnnnnnnnnnnnnnnnnnnnnnnnnnnnnnnnnnnnnnnnnnnnnnnnnnnnnnnnnnnnnnnnnnnnnnnnnnnnnnnnnnnnnnnnnnnnnnnnnnnnnnnnnnnnnnnnnnnnnnnnnnnnnnnnnnnnnnnnnnnnnnnnnnnnnnnnnnnnnnnnnnnnnnnnnnnnnnnnnnnnnnnnnnnnnnnnnnnnnnnnnnnnnnnnnnnnnnnnnnnnnnnnnnnnnnnnnnnnnnnnnnnnnnnnnnnnnnnnnnnnnnnnnnnnnnnnnnnnnnnnnnnnnnnnnnnnnnnnnnnnnnnnnnnnnnnnnnnnnnnnnnnnnnnnnnnnnnnnnnnnnnnnnnnnnnnnnnnnnnnnnnnnnnnnnnnnnnnnnnnnnnnnnnnnnnnnnnnnnnnnnnnnnnnnnnnnnnnnnnnnnnnnnnnnnnnnnnnnnnnnnnnnnnnnnnnnnnnnnnnnnnnnnnnnnnnnnnnnnnnnnnnnnnnnnnnnnnnnnnnnnnnnnnnnnnnnnnnnnnnnnnnnnnnnnnnnnnnnnnnnnnnnnnnnnnnnnnnnnnnnnnnnnnnnnnnnnnnnnnnnnnnnnnnnnnnnnnnnnnnnnnnnnnnnnnnnnnnnnnnnnnnnnnnnnnnnnnnnnnnnnnnnnnnnnnnnnnnnnnnnnnnnnnnnnnnnnnnnnnnnnnnnnnnnnnnnnnnnnnnnnnnnnnnnnnnnnnnnnnnnnnnnnnnnnnnnnnnnnnnnnnnnnnnnnnnnnnnnnnnnnnnnnnnnnnnnnnnnnnnnnnnnnnnnnnnnnnnnnnnnnnnnnnnnnnnnnnnnnnnnnnnnnnnnnnnnnnnnnnnnnnnnnnnnnnnnnnnnnnnnnnnnnnnnnnnnnnnnnnnnnnnnnnnnnnnnnnnnnnnnnnnnnnnnnnnnnnnnnnnnnnnnnnnnnnnnnnnnnnnnnnnnnnnnnnnnnnnnnnnnnnnnnnnnnnnnnnnnnnnnnnnnnnnnnnnnnnnnnnnnnnnnnnnnnnnnnnnnnnnnnnnnnnnnnnnnnnnnnnnnnnnnnnnnnnnnnnnnnnnnnnnnnnnnnnnnnnnnnnnnnnnnnnnnnnnnnnnnnnnnnnnnnnnnnnnnnnnnnnnnnnnnnnnnnnnnnnnnnnnnnnnnnnnnnnnnnnnnnnnnnnnnnnnnnnnnnnnnnnnnnnnnnnnnnnnnnnnnnnnnnnnnnnnnnnnnnnnnnnnnnnnnnnnnnnnnnnnnnnnnnnnnnnnnnnnnnnnnnnnnnnnnnnnnnnnnnnnnnnnnnnnnnnnnnnnnnnnnnnnnnnnnnnnnnnnnnnnnnnnnnnnnnnnnnnnnnnnnnnnnnnnnnnnnnnnnnnnnnnnnnnnnnnnnnnnnnnnnnnnnnnnnnnnnnnnnnnnnnnnnnnnnnnnnnnnnnnnnnnnnnnnnnnnnnnnnnnnnnnnnnnnnnnnnnnnnnnnnnnnnnnnnnnnnnnnnnnnnnnnnnnnnnnnnnnnnnnnnnnnnnnnnnnnnnnnnnnnnnnnnnnnnnnnnnnnnnnnnnnnnnnnnnnnnnnnnnnnnnnnnnnnnnnnnnnnnnnnnnnnnnnnnnnnnnnnnnnnnnnnnnnnnnnnnnnnnnnnnnnnnnnnnnnnnnnnnnnnnnnnnnnnnnnnnnnnnnnnnnnnnnnnnnnnnnnnnnnnnnnnnnnnnnnnnnnnnnnnnnnnnnnnnnnnnnnnnnnnnnnnnnnnnnnnnnnnnnnnnnnnnnnnnnnnnnnnnnnnnnnnnnnnnnnnnnnnnnnnnnnnnnnnnnnnnnnnnnnnnnnnnnnnnnnnnnnnnnnnnnnnnnnnnnnnnnnnnnnnnnnnnnnnnnnnnnnnnnnnnnnnnnnnnnnnnnnnnnnnnnnnnnnnnnnnnnnnnnnnnnnnnnnnnnnnnnnnnnnnnnnnnnnnnnnnnnnnnnnnnnnnnnnnnnnnnnnnnnnnnnnnnnnnnnnnnnnnnnnnnnnnnnnnnnnnnnnnnnnnnnnnnnnnnnnnnnnnnnnnnnnnnnnnnnnnnnnnnnnnnnnnnnnnnnnnnnnnnnnnnnnnnnnnnnnnnnnnnnnnnnnnnnnnnnnnnnnnnnnnnnnnnnnnnnnnnnnnnnnnnnnnnnnnnnnnnnnnnnnnnnnnnnnnnnnnnnnnnnnnnnnnnnnnnnnnnnnnnnnnnnnnnnnnnnnnnnnnnnnnnnnnnnnnnnnnnnnnnnnnnnnnnnnnnnnnnnnnnnnnnnnnnnnnnnnnnnnnnnnnnnnnnnnnnnnnnnnnnnnnnnnnnnnnnnnnnnnnnnnnnnnnnnnnnnnnnnnnnnnnnnnnnnnnnnnnnnnnnnnnnnnnnnnnnnnnnnnnnnnnnnnnnnnnnnnnnnnnnnnnnnnnnnnnnnnnnnnnnnnnnnnnnnnnnnnnnnnnnnnnnnnnnnnnnnnnnnnnnnnnnnnnnnnnnnnnnnnnnnnnnnnnnnnnnnnnnnnnnnnnnnnnnnnnnnnnnnnnnnnnnnnnnnnnnnnnnnnnnnnnnnnnnnnnnnnnnnnnnnnnnnnnnnnnnnnnnnnnnnnnnnnnnnnnnnnnnnnnnnnnnnnnnnnnnnnnnnnnnnnnnnnnnnnnnnnnnnnnnnnnnnnnnnnnnnnnnnnnnnnnnnnnnnnnnnnnnnnnnnnnnnnnnnnnnnnnnnnnnnnnnnnnnnnnnnnnnnnnnnnnnnnnnnnnnnnnnnnnnnnnnnnnnnnnnnnnnnnnnnnnnnnnnnnnnnnnnnnnnnnnnnnnnnnnnnnnnnnnnnnnnnnnnnnnnnnnnnnnnnnnnnnnnnnnnnnnnnnnnnnnnnnnnnnnnnnnnnnnnnnnnnnnnnnnnnnnnnnnnnnnnnnnnnnnnnnnnnnnnnnnnnnnnnnnnnnnnnnnnnnnnnnnnnnnnnnnnnnnnnnnnnnnnnnnnnnnnnnnnnnnnnnnnnnnnnnnnnnnnnnnnnnnnnnnnnnnnnnnnnnnnnnnnnnnnnnnnnnnnnnnnnnnnnnnnnnnnnnnnnnnnnnnnnnnnnnnnnnnnnnnnnnnnnnnnnnnnnnnnnnnnnnnnnnnnnnnnnnnnnnnnnnnnnnnnnnnnnnnnnnnnnnnnnnnnnnnnnnnnnnnnnnnnnnnnnnnnnnnnnnnnnnnnnnnnnnnnnnnnnnnnnnnnnnnnnnnnnnnnnnnnnnnnnnnnnnnnnnnnnnnnnnnnnnnnnnnnnnnnnnnnnnnnnnnnnnnnnnnnnnnnnnnnnnnnnnnnnnnnnnnnnnnnnnnnnnnnnnnnnnnnnnnnnnnnnnnnnnnnnnnnnnnnnnnnnnnnnnnnnnnnnnnnnnnnnnnnnnnnnnnnnnnnnnnnnnnnnnnnnnnnnnnnnnnnnnnnnnnnnnnnnnnnnnnnnnnnnnnnnnnnnnnnnnnnnnnnnnnnnnnnnnnnnnnnnnnnnnnnnnnnnnnnnnnnnnnnnnnnnnnnnnnnnnnnnnnnnnnnnnnnnnnnnnnnnnnnnnnnnnnnnnnnnnnnnnnnnnnnnnnnnnnnnnnnnnnnnnnnnnnnnnnnnnnnnnnnnnnnnnnnnnnnnnnnnnnnnnnnnnnnnnnnnnnnnnnnnnnnnnnnnnnnnnnnnnnnnnnnnnnnnnnnnnnnnnnnnnnnnnnnnnnnnnnnnnnnnnnnnnnnnnnnnnnnnnnnnnnnnnnnnnnnnnnnnnnnnnnnnnnnnnnnnnnnnnnnnnnnnnnnnnnnnnnnnnnnnnnnnnnnnnnnnnnnnnnnnnnnnnnnnnnnnnnnnnnnnnnnnnnnnnnnnnnnnnnnnnnnnnnnnnnnnnnnnnnnnnnnnnnnnnnnnnnnnnnnnnnnnnnnnnnnnnnnnnnnnnnnnnnnnnnnnnnnnnnnnnnnnnnnnnnnnnnnnnnnnnnnnnnnnnnnnnnnnnnnnnnnnnnnnnnnnnnnnnnnnnnnnnnnnnnnnnnnnnnnnnnnnnnnnnnnnnnnnnnnnnnnnnnnnnnnnnnnnnnnnnnnnnnnnnnnnnnnnnnnnnnnnnnnnnnnnnnnnnnnnnnnnnnnnnnnnnnnnnnnnnnnnnnnnnnnnnnnnnnnnnnnnnnnnnnnnnnnnnnnnnnnnnnnnnnnnnnnnnnnnnnnnnnnnnnnnnnnnnnnnnnnnnnnnnnnnnnnnnnnnnnnnnnnnnnnnnnnnnnnnnnnnnnnnnnnnnnnnnnnnnnnnnnnnnnnnnnnnnnnnnnnnnnnnnnnnnnnnnnnnnnnnnnnnnnnnnnnnnnnnnnnnnnnnnnnnnnnnnnnnnnnnnnnnnnnnnnnnnnnnnnnnnnnnnnnnnnnnnnnnnnnnnnnnnnnnnnnnnnnnnnnnnnnnnnnnnnnnnnnnnnnnnnnnnnnnnnnnnnnnnnnnnnnnnnnnnnnnnnnnnnnnnnnnnnnnnnnnnnnnnnnnnnnnnnnnnnnnnnnnnnnnnnnnnnnnnnnnnnnnnnnnnnnnnnnnnnnnnnnnnnnnnnnnnnnnnnnnnnnnnnnnnnnnnnnnnnnnnnnnnnnnnnnnnnnnnnnnnnnnnnnnnnnnnnnnnnnnnnnnnnnnnnnnnnnnnnnnnnnnnnnnnnnnnnnnnnnnnnnnnnnnnnnnnnnnnnnnnnnnnnnnnnnnnnnnnnnnnnnnnnnnnnnnnnnnnnnnnnnnnnnnnnnnnnnnnnnnnnnnnnnnnnnnnnnnnnnnnnnnnnnnnnnnnnnnnnnnnnnnnnnnnnnnnnnnnnnnnnnnnnnnnnnnnnnnnnnnnnnnnnnnnnnnnnnnnnnnnnnnnnnnnnnnnnnnnnnnnnnnnnnnnnnnnnnnnnnnnnnnnnnnnnnnnnnnnnnnnnnnnnnnnnnnnnnnnnnnnnnnnnnnnnnnnnnnnnnnnnnnnnnnnnnnnnnnnnnnnnnnnnnnnnnnnnnnnnnnnnnnnnnnnnnnnnnnnnnnnnnnnnnnnnnnnnnnnnnnnnnnnnnnnnnnnnnnnnnnnnnnnnnnnnnnnnnnnnnnnnnnnnnnnnnnnnnnnnnnnnnnnnnnnnnnnnnnnnnnnnnnnnnnnnnnnnnnnnnnnnnnnnnnnnnnnnnnnnnnnnnnnnnnnnnnnnnnnnnnnnnnnnnnnnnnnnnnnnnnnnnnnnnnnnnnnnnnnnnnnnnnnnnnnnnnnnnnnnnnnnnnnnnnnnnnnnnnnnnnnnnnnnnnnnnnnnnnnnnnnnnnnnnnnnnnnnnnnnnnnnnnnnnnnnnnnnnnnnnnnnnnnnnnnnnnnnnnnnnnnnnnnnnnnnnnnnnnnnnnnnnnnnnnnnnnnnnnnnnnnnnnnnnnnnnnnnnnnnnnnnnnnnnnnnnnnnnnnnnnnnnnnnnnnnnnnnnnnnnnnnnnnnnnnnnnnnnnnnnnnnnnnnnnnnnnnnnnnnnnnnnnnnnnnnnnnnnnnnnnnnnnnnnnnnnnnnnnnnnnnnnnnnnnnnnnnnnnnnnnnnnnnnnnnnnnnnnnnnnnnnnnnnnnnnnnnnnnnnnnnnnnnnnnnnnnnnnnnnnnnnnnnnnnnnnnnnnnnnnnnnnnnnnnnnnnnnnnnnnnnnnnnnnnnnnnnnnnnnnnnnnnnnnnnnnnnnnnnnnnnnnnnnnnnnnnnnnnnnnnnnnnnnnnnnnnnnnnnnnnnnnnnnnnnnnnnnnnnnnnnnnnnnnnnnnnnnnnnnnnnnnnnnnnnnnnnnnnnnnnnnnnnnnnnnnnnnnnnnnnnnnnnnnnnnnnnnnnnnnnnnnnnnnnnnnnnnnnnnnnnnnnnnnnnnnnnnnnnnnnnnnnnnnnnnnnnnnnnnnnnnnnnnnnnnnnnnnnnnnnnnnnnnnnnnnnnnnnnnnnnnnnnnnnnnnnnnnnnnnnnnnnnnnnnnnnnnnnnnnnnnnnnnnnnnnnnnnnnnnnnnnnnnnnnnnnnnnnnnnnnnnnnnnnnnnnnnnnnnnnnnnnnnnnnnnnnnnnnnnnnnnnnnnnnnnnnnnnnnnnnnnnnnnnnnnnnnnnnnnnnnnnnnnnnnnnnnnnnnnnnnnnnnnnnnnnnnnnnnnnnnnnnnnnnnnnnnnnnnnnnnnnnnnnnnnnnnnnnnnnnnnnnnnnnnnnnnnnnnnnnnnnnnnnnnnnnnnnnnnnnnnnnnnnnnnnnnnnnnnnnnnnnnnnnnnnnnnnnnnnnnnnnnnnnnnnnnnnnnnnnnnnnnnnnnnnnnnnnnnnnnnnnnnnnnnnnnnnnnnnnnnnnnnnnnnnnnnnnnnnnnnnnnnnnnnnnnnnnnnnnnnnnnnnnnnnnnnnnnnnnnnnnnnnnnnnnnnnnnnnnnnnnnnnnnnnnnnnnnnnnnnnnnnnnnnnnnnnnnnnnnnnnnnnnnnnnnnnnnnnnnnnnnnnnnnnnnnnnnnnnnnnnnnnnnnnnnnnnnnnnnnnnnnnnnnnnnnnnnnnnnnnnnnnnnnnnnnnnnnnnnnnnnnnnnnnnnnnnnnnnnnnnnnnnnnnnnnnnnnnnnnnnnnnnnnnnnnnnnnnnnnnnnnnnnnnnnnnnnnnnnnnnnnnnnnnnnnnnnnnnnnnnnnnnnnnnnnnnnnnnnnnnnnnnnnnnnnnnnnnnnnnnnnnnnnnnnnnnnnnnnnnnnnnnnnnnnnnnnnnnnnnnnnnnnnnnnnnnnnnnnnnnnnnnnnnnnnnnnnnnnnnnnnnnnnnnnnnnnnnnnnnnnnnnnnnnnnnnnnnnnnnnnnnnnnnnnnnnnnnnnnnnnnnnnnnnnnnnnnnnnnnnnnnnnnnnnnnnnnnnnnnnnnnnnnnnnnnnnnnnnnnnnnnnnnnnnnnnnnnnnnnnnnnnnnnnnnnnnnnnnnnnnnnnnnnnnnnnnnnnnnnnnnnnnnnnnnnnnnnnnnnnnnnnnnnnnnnnnnnnnnnnnnnnnnnnnnnnnnnnnnnnnnnnnnnnnnnnnnnnnnnnnnnnnnnnnnnnnnnnnnnnnnnnnnnnnnnnnnnnnnnnnnnnnnnnnnnnnnnnnnnnnnnnnnnnnnnnnnnnnnnnnnnnnnnnnnnnnnnnnnnnnnnnnnnnnnnnnnnnnnnnnnnnnnnnnnnnnnnnnnnnnnnnnnnnnnnnnnnnnnnnnnnnnnnnnnnnnnnnnnnnnnnnnnnnnnnnnnnnnnnnnnnnnnnnnnnnnnnnnnnnnnnnnnnnnnnnnnnnnnnnnnnnnnnnnnnnnnnnnnnnnnnnnnnnnnnnnnnnnnnnnnnnnnnnnnnnnnnnnnnnnnnnnnnnnnnnnnnnnnnnnnnnnnnnnnnnnnnnnnnnnnnnnnnnnnnnnnnnnnnnnnnnnnnnnnnnnnnnnnnnnnnnnnnnnnnnnnnnnnnnnnnnnnnnnnnnnnnnnnnnnnnnnnnnnnnnnnnnnnnnnnnnnnnnnnnnnnnnnnnnnnnnnnnnnnnnnnnnnnnnnnnnnnnnnnnnnnnnnnnnnnnnnnnnnnnnnnnnnnnnnnnnnnnnnnnnnnnnnnnnnnnnnnnnnnnnnnnnnnnnnnnnnnnnnnnnnnnnnnnnnnnnnnnnnnnnnnnnnnnnnnnnnnnnnnnnnnnnnnnnnnnnnnnnnnnnnnnnnnnnnnnnnnnnnnnnnnnnnnnnnnnnnnnnnnnnnnnnnnnnnnnnnnnnnnnnnnnnnnnnnnnnnnnnnnnnnnnnnnnnnnnnnnnnnnnnnnnnnnnnnnnnnnnnnnnnnnnnnnnnnnnnnnnnnnnnnnnnnnnnnnnnnnnnnnnnnnnnnnnnnnnnnnnnnnnnnnnnnnnnnnnnnnnnnnnnnnnnnnnnnnnnnnnnnnnnnnnnnnnnnnnnnnnnnnnnnnnnnnnnnnnnnnnnnnnnnnnnnnnnnnnnnnnnnnnnnnnnnnnnnnnnnnnnnnnnnnnnnnnnnnnnnnnnnnnnnnnnnnnnnnnnnnnnnnnnnnnnnnnnnnnnnnnnnnnnnnnnnnnnnnnnnnnnnnnnnnnnnnnnnnnnnnnnnnnnnnnnnnnnnnnnnnnnnnnnnnnnnnnnnnnnnnnnnnnnnnnnnnnnnnnnnnnnnnnnnnnnnnnnnnnnnnnnnnnnnnnnnnnnnnnnnnnnnnnnnnnnnnnnnnnnnnnnnnnnnnnnnnnnnnnnnnnnnnnnnnnnnnnnnnnnnnnnnnnnnnnnnnnnnnnnnnnnnnnnnnnnnnnnnnnnnnnnnnnnnnnnnnnnnnnnnnnnnnnnnnnnnnnnnnnnnnnnnnnnnnnnnnnnnnnnnnnnnnnnnnnnnnnnnnnnnnnnnnnnnnnnnnnnnnnnnnnnnnnnnnnnnnnnnnnnnnnnnnnnnnnnnnnnnnnnnnnnnnnnnnnnnnnnnnnnnnnnnnnnnnnnnnnnnnnnnnnnnnnnnnnnnnnnnnnnnnnnnnnnnnnnnnnnnnnnnnnnnnnnnnnnnnnnnnnnnnnnnnnnnnnnnnnnnnnnnnnnnnnnnnnnnnnnnnnnnnnnnnnnnnnnnnnnnnnnnnnnnnnnnnnnnnnnnnnnnnnnnnnnnnnnnnnnnnnnnnnnnnnnnnnnnnnnnnnnnnnnnnnnnnnnnnnnnnnnnnnnnnnnnnnnnnnnnnnnnnnnnnnnnnnnnnnnnnnnnnnnnnnnnnnnnnnnnnnnnnnnnnnnnnnnnnnnnnnnnnnnnnnnnnnnnnnnnnnnnnnnnnnnnnnnnnnnnnnnnnnnnnnnnnnnnnnnnnnnnnnnnnnnnnnnnnnnnnnnnnnnnnnnnnnnnnnnnnnnnnnnnnnnnnnnnnnnnnnnnnnnnnnnnnnnnnnnnnnnnnnnnnnnnnnnnnnnnnnnnnnnnnnnnnnnnnnnnnnnnnnnnnnnnnnnnnnnnnnnnnnnnnnnnnnnnnnnnnnnnnnnnnnnnnnnnnnnnnnnnnnnnnnnnnnnnnnnnnnnnnnnnnnnnnnnnnnnnnnnnnnnnnnnnnnnnnnnnnnnnnnnnnnnnnnnnnnnnnnnnnnnnnnnnnnnnnnnnnnnnnnnnnnnnnnnnnnnnnnnnnnnnnnnnnnnnnnnnnnnnnnnnnnnnnnnnnnnnnnnnnnnnnnnnnnnnnnnnnnnnnnnnnnnnnnnnnnnnnnnnnnnnnnnnnnnnnnnnnnnnnnnnnnnnnnnnnnnnnnnnnnnnnnnnnnnnnnnnnnnnnnnnnnnnnnnnnnnnnnnnnnnnnnnnnnnnnnnnnnnnnnnnnnnnnnnnnnnnnnnnnnnnnnnnnnnnnnnnnnnnnnnnnnnnnnnnnnnnnnnnnnnnnnnnnnnnnnnnnnnnnnnnnnnnnnnnnnnnnnnnnnnnnnnnnnnnnnnnnnnnnnnnnnnnnnnnnnnnnnnnnnnnnnnnnnnnnnnnnnnnnnnnnnnnnnnnnnnnnnnnnnnnnnnnnnnnnnnnnnnnnnnnnnnnnnnnnnnnnnnnnnnnnnnnnnnnnnnnnnnnnnnnnnnnnnnnnnnnnnnnnnnnnnnnnnnnnnnnnnnnnnnnnnnnnnnnnnnnnnnnnnnnnnnnnnnnnnnnnnnnnnnnnnnnnnnnnnnnnnnnnnnnnnnnnnnnnnnnnnnnnnnnnnnnnnnnnnnnnnnnnnnnnnnnnnnnnnnnnnnnnnnnnnnnnnnnnnnnnnnnnnnnnnnnnnnnnnnnnnnnnnnnnnnnnnnnnnnnnnnnnnnnnnnnnnnnnnnnnnnnnnnnnnnnnnnnnnnnnnnnnnnnnnnnnnnnnnnnnnnnnnnnnnnnnnnnnnnnnnnnnnnnnnnnnnnnnnnnnnnnnnnnnnnnnnnnnnnnnnnnnnnnnnnnnnnnnnnnnnnnnnnnnnnnnnnnnnnnnnnnnnnnnnnnnnnnnnnnnnnnnnnnnnnnnnnnnnnnnnnnnnnnnnnnnnnnnnnnnnnnnnnnnnnnnnnnnnnnnnnnnnnnnnnnnnnnnnnnnnnnnnnnnnnnnnnnnnnnnnnnnnnnnnnnnnnnnnnnnnnnnnnnnnnnnnnnnnnnnnnnnnnnnnnnnnnnnnnnnnnnnnnnnnnnnnnnnnnnnnnnnnnnnnnnnnnnnnnnnnnnnnnnnnnnnnnnnnnnnnnnnnnnnnnnnnnnnnnnnnnnnnnnnnnnnnnnnnnnnnnnnnnnnnnnnnnnnnnnnnnnnnnnnnnnnnnnnnnnnnnnnnnnnnnnnnnnnnnnnnnnnnnnnnnnnnnnnnnnnnnnnnnnnnnnnnnnnnnnnnnnnnnnnnnnnnnnnnnnnnnnnnnnnnnnnnnnnnnnnnnnnnnnnnnnnnnnnnnnnnnnnnnnnnnnnnnnnnnnnnnnnnnnnnnnnnnnnnnnnnnnnnnnnnnnnnnnnnnnnnnnnnnnnnnnnnnnnnnnnnnnnnnnnnnnnnnnnnnnnnnnnnnnnnnnnnnnnnnnnnnnnnnnnnnnnnnnnnnnnnnnnnnnnnnnnnnnnnnnnnnnnnnnnnnnnnnnnnnnnnnnnnnnnnnnnnnnnnnnnnnnnnnnnnnnnnnnnnnnnnnnnnnnnnnnnnnnnnnnnnnnnnnnnnnnnnnnnnnnnnnnnnnnnnnnnnnnnnnnnnnnnnnnnnnnnnnnnnnnnnnnnnnnnnnnnnnnnnnnnnnnnnnnnnnnnnnnnnnnnnnnnnnnnnnnnnnnnnnnnnnnnnnnnnnnnnnnnnnnnnnnnnnnnnnnnnnnnnnnnnnnnnnnnnnnnnnnnnnnnnnnnnnnnnnnnnnnnnnnnnnnnnnnnnnnnnnnnnnnnnnnnnnnnnnnnnnnnnnnnnnnnnnnnnnnnnnnnnnnnnnnnnnnnnnnnnnnnnnnnnnnnnnnnnnnnnnnnnnnnnnnnnnnnnnnnnnnnnnnnnnnnnnnnnnnnnnnnnnnnnnnnnnnnnnnnnnnnnnnnnnnnnnnnnnnnnnnnnnnnnnnnnnnnnnnnnnnnnnnnnnnnnnnnnnnnnnnnnnnnnnnnnnnnnnnnnnnnnnnnnnnnnnnnnnnnnnnnnnnnnnnnnnnnnnnnnnnnnnnnnnnnnnnnnnnnnnnnnnnnnnnnnnnnnnnnnnnnnnnnnnnnnnnnnnnnnnnnnnnnnnnnnnnnnnnnnnnnnnnnnnnnnnnnnnnnnnnnnnnnnnnnnnnnnnnnnnnnnnnnnnnnnnnnnnnnnnnnnnnnnnnnnnnnnnnnnnnnnnnnnnnnnnnnnnnnnnnnnnnnnnnnnnnnnnnnnnnnnnnnnnnnnnnnnnnnnnnnnnnnnnnnnnnnnnnnnnnnnnnnnnnnnnnnnnnnnnnnnnnnnnnnnnnnnnnnnnnnnnnnnnnnnnnnnnnnnnnnnnnnnnnnnnnnnnnnnnnnnnnnnnnnnnnnnnnnnnnnnnnnnnnnnnnnnnnnnnnnnnnnnnnnnnnnnnnnnnnnnnnnnnnnnnnnnnnnnnnnnnnnnnnnnnnnnnnnnnnnnnnnnnnnnnnnnnnnnnnnnnnnnnnnnnnnnnnnnnnnnnnnnnnnnnnnnnnnnnnnnnnnnnnnnnnnnnnnnnnnnnnnnnnnnnnnnnnnnnnnnnnnnnnnnnnnnnnnnnnnnnnnnnnnnnnnnnnnnnnnnnnnnnnnnnnnnnnnnnnnnnnnnnnnnnnnnnnnnnnnnnnnnnnnnnnnnnnnnnnnnnnnnnnnnnnnnnnnnnnnnnnnnnnnnnnnnnnnnnnnnnnnnnnnnnnnnnnnnnnnnnnnnnnnnnnnnnnnnnnnnnnnnnnnnnnnnnnnnnnnnnnnnnnnnnnnnnnnnnnnnnnnnnnnnnnnnnnnnnnnnnnnnnnnnnnnnnnnnnnnnnnnnnnnnnnnnnnnnnnnnnnnnnnnnnnnnnnnnnnnnnnnnnnnnnnnnnnnnnnnnnnnnnnnnnnnnnnnnnnnnnnnnnnnnnnnnnnnnnnnnnnnnnnnnnnnnnnnnnnnnnnnnnnnnnnnnnnnnnnnnnnnnnnnnnnnnnnnnnnnnnnnnnnnnnnnnnnnnnnnnnnnnnnnnnnnnnnnnnnnnnnnnnnnnnnnnnnnnnnnnnnnnnnnnnnnnnnnnnnnnnnnnnnnnnnnnnnnnnnnnnnnnnnnnnnnnnnnnnnnnnnnnnnnnnnnnnnnnnnnnnnnnnnnnnnnnnnnnnnnnnnnnnnnnnnnnnnnnnnnnnnnnnnnnnnnnnnnnnnnnnnnnnnnnnnnnnnnnnnnnnnnnnnnnnnnnnnnnnnnnnnnnnnnnnnnnnnnnnnnnnnnnnnnnnnnnnnnnnnnnnnnnnnnnnnnnnnnnnnnnnnnnnnnnnnnnnnnnnnnnnnnnnnnnnnnnnnnnnnnnnnnnnnnnnnnnnnnnnnnnnnnnnnnnnnnnnnnnnnnnnnnnnnnnnnnnnnnnnnnnnnnnnnnnnnnnnnnnnnnnnnnnnnnnnnnnnnnnnnnnnnnnnnnnnnnnnnnnnnnnnnnnnnnnnnnnnnnnnnnnnnnnnnnnnnnnnnnnnnnnnnnnnnnnnnnnnnnnnnnnnnnnnnnnnnnnnnnnnnnnnnnnnnnnnnnnnnnnnnnnnnnnnnnnnnnnnnnnnnnnnnnnnnnnnnnnnnnnnnnnnnnnnnnnnnnnnnnnnnnnnnnnnnnnnnnnnnnnnnnnnnnnnnnnnnnnnnnnnnnnnnnnnnnnnnnnnnnnnnnnnnnnnnnnnnnnnnnnnnnnnnnnnnnnnnnnnnnnnnnnnnnnnnnnnnnnnnnnnnnnnnnnnnnnnnnnnnnnnnnnnnnnnnnnnnnnnnnnnnnnnnnnnnnnnnnnnnnnnnnnnnnnnnnnnnnnnnnnnnnnnnnnnnnnnnnnnnnnnnnnnnnnnnnnnnnnnnnnnnnnnnnnnnnnnnnnnnnnnnnnnnnnnnnnnnnnnnnnnnnnnnnnnnnnnnnnnnnnnnnnnnnnnnnnnnnnnnnnnnnnnnnnnnnnnnnnnnnnnnnnnnnnnnnnnnnnnnnnnnnnnnnnnnnnnnnnnnnnnnnnnnnnnnnnnnnnnnnnnnnnnnnnnnnnnnnnnnnnnnnnnnnnnnnnnnnnnnnnnnnnnnnnnnnnnnnnnnnnnnnnnnnnnnnnnnnnnnnnnnnnnnnnnnnnnnnnnnnnnnnnnnnnnnnnnnnnnnnnnnnnnnnnnnnnnnnnnnnnnnnnnnnnnnnnnnnnnnnnnnnnnnnnnnnnnnnnnnnnnnnnnnnnnnnnnnnnnnnnnnnnnnnnnnnnnnnnnnnnnnnnnnnnnnnnnnnnnnnnnnnnnnnnnnnnnnnnnnnnnnnnnnnnnnnnnnnnnnnnnnnnnnnnnnnnnnnnnnnnnnnnnnnnnnnnnnnnnnnnnnnnnnnnnnnnnnnnnnnnnnnnnnnnnnnnnnnnnnnnnnnnnnnnnnnnnnnnnnnnnnnnnnnnnnnnnnnnnnnnnnnnnnnnnnnnnnnnnnnnnnnnnnnnnnnnnnnnnnnnnnnnnnnnnnnnnnnnnnnnnnnnnnnnnnnnnnnnnnnnnnnnnnnnnnnnnnnnnnnnnnnnnnnnnnnnnnnnnnnnnnnnnnnnnnnnnnnnnnnnnnnnnnnnnnnnnnnnnnnnnnnnnnnnnnnnnnnnnnnnnnnnnnnnnnnnnnnnnnnnnnnnnnnnnnnnnnnnnnnnnnnnnnnnnnnnnnnnnnnnnnnnnnnnnnnnnnnnnnnnnnnnnnnnnnnnnnnnnnnnnnnnnnnnnnnnnnnnnnnnnnnnnnnnnnnnnnnnnnnnnnnnnnnnnnnnnnnnnnnnnnnnnnnnnnnnnnnnnnnnnnnnnnnnnnnnnnnnnnnnnnnnnnnnnnnnnnnnnnnnnnnnnnnnnnnnnnnnnnnnnnnnnnnnnnnnnnnnnnnnnnnnnnnnnnnnnnnnnnnnnnnnnnnnnnnnnnnnnnnnnnnnnnnnnnnnnnnnnnnnnnnnnnnnnnnnnnnnnnnnnnnnnnnnnnnnnnnnnnnnnnnnnnnnnnnnnnnnnnnnnnnnnnnnnnnnnnnnnnnnnnnnnnnnnnnnnnnnnnnnnnnnnnnnnnnnnnnnnnnnnnnnnnnnnnnnnnnnnnnnnnnnnnnnnnnnnnnnnnnnnnnnnnnnnnnnnnnnnnnnnnnnnnnnnnnnnnnnnnnnnnnnnnnnnnnnnnnnnnnnnnnnnnnnnnnnnnnnnnnnnnnnnnnnnnnnnnnnnnnnnnnnnnnnnnnnnnnnnnnnnnnnnnnnnnnnnnnnnnnnnnnnnnnnnnnnnnnnnnnnnnnnnnnnnnnnnnnnnnnnnnnnnnnnnnnnnnnnnnnnnnnnnnnnnnnnnnnnnnnnnnnnnnnnnnnnnnnnnnnnnnnnnnnnnnnnnnnnnnnnnnnnnnnnnnnnnnnnnnnnnnnnnnnnnnnnnnnnnnnnnnnnnnnnnnnnnnnnnnnnnnnnnnnnnnnnnnnnnnnnnnnnnnnnnnnnnnnnnnnnnnnnnnnnnnnnnnnnnnnnnnnnnnnnnnnnnnnnnnnnnnnnnnnnnnnnnnnnnnnnnnnnnnnnnnnnnnnnnnnnnnnnnnnnnnnnnnnnnnnnnnnnnnnnnnnnnnnnnnnnnnnnnnnnnnnnnnnnnnnnnnnnnnnnnnnnnnnnnnnnnnnnnnnnnnnnnnnnnnnnnnnnnnnnnnnnnnnnnnnnnnnnnnnnnnnnnnnnnnnnnnnnnnnnnnnnnnnnnnnnnnnnnnnnnnnnnnnnnnnnnnnnnnnnnnnnnnnnnnnnnnnnnnnnnnnnnnnnnnnnnnnnnnnnnnnnnnnnnnnnnnnnnnnnnnnnnnnnnnnnnnnnnnnnnnnnnnnnnnnnnnnnnnnnnnnnnnnnnnnnnnnnnnnnnnnnnnnnnnnnnnnnnnnnnnnnnnnnnnnnnnnnnnnnnnnnnnnnnnnnnnnnnnnnnnnnnnnnnnnnnnnnnnnnnnnnnnnnnnnnnnnnnnnnnnnnnnnnnnnnnnnnnnnnnnnnnnnnnnnnnnnnnnnnnnnnnnnnnnnnnnnnnnnnnnnnnnnnnnnnnnnnnnnnnnnnnnnnnnnnnnnnnnnnnnnnnnnnnnnnnnnnnnnnnnnnnnnnnnnnnnnnnnnnnnnnnnnnnnnnnnnnnnnnnnnnnnnnnnnnnnnnnnnnnnnnnnnnnnnnnnnnnnnnnnnnnnnnnnnnnnnnnnnnnnnnnnnnnnnnnnnnnnnnnnnnnnnnnnnnnnnnnnnnnnnnnnnnnnnnnnnnnnnnnnnnnnnnnnnnnnnnnnnnnnnnnnnnnnnnnnnnnnnnnnnnnnnnnnnnnnnnnnnnnnnnnnnnnnnnnnnnnnnnnnnnnnnnnnnnnnnnnnnnnnnnnnnnnnnnnnnnnnnnnnnnnnnnnnnnnnnnnnnnnnnnnnnnnnnnnnnnnnnnnnnnnnnnnnnnnnnnnnnnnnnnnnnnnnnnnnnnnnnnnnnnnnnnnnnnnnnnnnnnnnnnnnnnnnnnnnnnnnnnnnnnnnnnnnnnnnnnnnnnnnnnnnnnnnnnnnnnnnnnnnnnnnnnnnnnnnnnnnnnnnnnnnnnnnnnnnnnnnnnnnnnnnnnnnnnnnnnnnnnnnnnnnnnnnnnnnnnnnnnnnnnnnnnnnnnnnnnnnnnnnnnnnnnnnnnnnnnnnnnnnnnnnnnnnnnnnnnnnnnnnnnnnnnnnnnnnnnnnnnnnnnnnnnnnnnnnnnnnnnnnnnnnnnnnnnnnnnnnnnnnnnnnnnnnnnnnnnnnnnnnnnnnnnnnnnnnnnnnnnnnnnnnnnnnnnnnnnnnnnnnnnnnnnnnnnnnnnnnnnnnnnnnnnnnnnnnnnnnnnnnnnnnnnnnnnnnnnnnnnnnnnnnnnnnnnnnnnnnnnnnnnnnnnnnnnnnnnnnnnnnnnnnnnnnnnnnnnnnnnnnnnnnnnnnnnnnnnnnnnnnnnnnnnnnnnnnnnnnnnnnnnnnnnnnnnnnnnnnnnnnnnnnnnnnnnnnnnnnnnnnnnnnnnnnnnnnnnnnnnnnnnnnnnnnnnnnnnnnnnnnnnnnnnnnnnnnnnnnnnnnnnnnnnnnnnnnnnnnnnnnnnnnnnnnnnnnnnnnnnnnnnnnnnnnnnnnnnnnnnnnnnnnnnnnnnnnnnnnnnnnnnnnnnnnnnnnnnnnnnnnnnnnnnnnnnnnnnnnnnnnnnnnnnnnnnnnnnnnnnnnnnnnnnnnnnnnnnnnnnnnnnnnnnnnnnnnnnnnnnnnnnnnnnnnnnnnnnnnnnnnnnnnnnnnnnnnnnnnnnnnnnnnnnnnnnnnnnnnnnnnnnnnnnnnnnnnnnnnnnnnnnnnnnnnnnnnnnnnnnnnnnnnnnnnnnnnnnnnnnnnnnnnnnnnnnnnnnnnnnnnnnnnnnnnnnnnnnnnnnnnnnnnnnnnnnnnnnnnnnnnnnnnnnnnnnnnnnnnnnnnnnnnnnnnnnnnnnnnnnnnnnnnnnnnnnnnnnnnnnnnnnnnnnnnnnnnnnnnnnnnnnnnnnnnnnnnnnnnnnnnnnnnnnnnnnnnnnnnnnnnnnnnnnnnnnnnnnnnnnnnnnnnnnnnnnnnnnnnnnnnnnnnnnnnnnnnnnnnnnnnnnnnnnnnnnnnnnnnnnnnnnnnnnnnnnnnnnnnnnnnnnnnnnnnnnnnnnnnnnnnnnnnnnnnnnnnnnnnnnnnnnnnnnnnnnnnnnnnnnnnnnnnnnnnnnnnnnnnnnnnnnnnnnnnnnnnnnnnnnnnnnnnnnnnnnnnnnnnnnnnnnnnnnnnnnnnnnnnnnnnnnnnnnnnnnnnnnnnnnnnnnnnnnnnnnnnnnnnnnnnnnnnnnnnnnnnnnnnnnnnnnnnnnnnnnnnnnnnnnnnnnnnnnnnnnnnnnnnnnnnnnnnnnnnnnnnnnnnnnnnnnnnnnnnnnnnnnnnnnnnnnnnnnnnnnnnnnnnnnnnnnnnnnnnnnnnnnnnnnnnnnnnnnnnnnnnnnnnnnnnnnnnnnnnnnnnnnnnnnnnnnnnnnnnnnnnnnnnnnnnnnnnnnnnnnnnnnnnnnnnnnnnnnnnnnnnnnnnnnnnnnnnnnnnnnnnnnnnnnnnnnnnnnnnnnnnnnnnnnnnnnnnnnnnnnnnnnnnnnnnnnnnnnnnnnnnnnnnnnnnnnnnnnnnnnnnnnnnnnnnnnnnnnnnnnnnnnnnnnnnnnnnnnnnnnnnnnnnnnnnnnnnnnnnnnnnnnnnnnnnnnnnnnnnnnnnnnnnnnnnnnnnnnnnnnnnnnnnnnnnnnnnnnnnnnnnnnnnnnnnnnnnnnnnnnnnnnnnnnnnnnnnnnnnnnnnnnnnnnnnnnnnnnnnnnnnnnnnnnnnnnnnnnnnnnnnnnnnnnnnnnnnnnnnnnnnnnnnnnnnnnnnnnnnnnnnnnnnnnnnnnnnnnnnnnnnnnnnnnnnnnnnnnnnnnnnnnnnnnnnnnnnnnnnnnnnnnnnnnnnnnnnnnnnnnnnnnnnnnnnnnnnnnnnnnnnnnnnnnnnnnnnnnnnnnnnnnnnnnnnnnnnnnnnnnnnnnnnnnnnnnnnnnnnnnnnnnnnnnnnnnnnnnnnnnnnnnnnnnnnnnnnnnnnnnnnnnnnnnnnnnnnnnnnnnnnnnnnnnnnnnnnnnnnnnnnnnnnnnnnnnnnnnnnnnnnnnnnnnnnnnnnnnnnnnnnnnnnnnnnnnnnnnnnnnnnnnnnnnnnnnnnnnnnnnnnnnnnnnnnnnnnnnnnnnnnnnnnnnnnnnnnnnnnnnnnnnnnnnnnnnnnnnnnnnnnnnnnnnnnnnnnnnnnnnnnnnnnnnnnnnnnnnnnnnnnnnnnnnnnnnnnnnnnnnnnnnnnnnnnnnnnnnnnnnnnnnnnnnnnnnnnnnnnnnnnnnnnnnnnnnnnnnnnnnnnnnnnnnnnnnnnnnnnnnnnnnnnnnnnnnnnnnnnnnnnnnnnnnnnnnnnnnnnnnnnnnnnnnnnnnnnnnnnnnnnnnnnnnnnnnnnnnnnnnnnnnnnnnnnnnnnnnnnnnnnnnnnnnnnnnnnnnnnnnnnnnnnnnnnnnnnnnnnnnnnnnnnnnnnnnnnnnnnnnnnnnnnnnnnnnnnnnnnnnnnnnnnnnnnnnnnnnnnnnnnnnnnnnnnnnnnnnnnnnnnnnnnnnnnnnnnnnnnnnnnnnnnnnnnnnnnnnnnnnnnnnnnnnnnnnnnnnnnnnnnnnnnnnnnnnnnnnnnnnnnnnnnnnnnnnnnnnnnnnnnnnnnnnnnnnnnnnnnnnnnnnnnnnnnnnnnnnnnnnnnnnnnnnnnnnnnnnnnnnnnnnnnnnnnnnnnnnnnnnnnnnnnnnnnnnnnnnnnnnnnnnnnnnnnnnnnnnnnnnnnnnnnnnnnnnnnnnnnnnnnnnnnnnnnnnnnnnnnnnnnnnnnnnnnnnnnnnnnnnnnnnnnnnnnnnnnnnnnnnnnnnnnnnnnnnnnnnnnnnnnnnnnnnnnnnnnnnnnnnnnnnnnnnnnnnnnnnnnnnnnnnnnnnnnnnnnnnnnnnnnnnnnnnnnnnnnnnnnnnnnnnnnnnnnnnnnnnnnnnnnnnnnnnnnnnnnnnnnnnnnnnnnnnnnnnnnnnnnnnnnnnnnnnnnnnnnnnnnnnnnnnnnnnnnnnnnnnnnnnnnnnnnnnnnnnnnnnnnnnnnnnnnnnnnnnnnnnnnnnnnnnnnnnnnnnnnnnnnnnnnnnnnnnnnnnnnnnnnnnnnnnnnnnnnnnnnnnnnnnnnnnnnnnnnnnnnnnnnnnnnnnnnnnnnnnnnnnnnnnnnnnnnnnnnnnnnnnnnnnnnnnnnnnnnnnnnnnnnnnnnnnnnnnnnnnnnnnnnnnnnnnnnnnnnnnnnnnnnnnnnnnnnnnnnnnnnnnnnnnnnnnnnnnnnnnnnnnnnnnnnnnnnnnnnnnnnnnnnnnnnnnnnnnnnnnnnnnnnnnnnnnnnnnnnnnnnnnnnnnnnnnnnnnnnnnnnnnnnnnnnnnnnnnnnnnnnnnnnnnnnnnnnnnnnnnnnnnnnnnnnnnnnnnnnnnnnnnnnnnnnnnnnnnnnnnnnnnnnnnnnnnnnnnnnnnnnnnnnnnnnnnnnnnnnnnnnnnnnnnnnnnnnnnnnnnnnnnnnnnnnnnnnnnnnnnnnnnnnnnnnnnnnnnnnnnnnnnnnnnnnnnnnnnnnnnnnnnnnnnnnnnnnnnnnnnnnnnnnnnnnnnnnnnnnnnnnnnnnnnnnnnnnnnnnnnnnnnnnnnnnnnnnnnnnnnnnnnnnnnnnnnnnnnnnnnnnnnnnnnnnnnnnnnnnnnnnnnnnnnnnnnnnnnnnnnnnnnnnnnnnnnnnnnnnnnnnnnnnnnnnnnnnnnnnnnnnnnnnnnnnnnnnnnnnnnnnnnnnnnnnnnnnnnnnnnnnnnnnnnnnnnnnnnnnnnnnnnnnnnnnnnnnnnnnnnnnnnnnnnnnnnnnnnnnnnnnnnnnnnnnnnnnnnnnnnnnnnnnnnnnnnnnnnnnnnnnnnnnnnnnnnnnnnnnnnnnnnnnnnnnnnnnnnnnnnnnnnnnnnnnnnnnnnnnnnnnnnnnnnnnnnnnnnnnnnnnnnnnnnnnnnnnnnnnnnnnnnnnnnnnnnnnnnnnnnnnnnnnnnnnnnnnnnnnnnnnnnnnnnnnnnnnnnnnnnnnnnnnnnnnnnnnnnnnnnnnnnnnnnnnnnnnnnnnnnnnnnnnnnnnnnnnnnnnnnnnnnnnnnnnnnnnnnnnnnnnnnnnnnnnnnnnnnnnnnnnnnnnnnnnnnnnnnnnnnnnnnnnnnnnnnnnnnnnnnnnnnnnnnnnnnnnnnnnnnnnnnnnnnnnnnnnnnnnnnnnnnnnnnnnnnnnnnnnnnnnnnnnnnnnnnnnnnnnnnnnnnnnnnnnnnnnnnnnnnnnnnnnnnnnnnnnnnnnnnnnnnnnnnnnnnnnnnnnnnnnnnnnnnnnnnnnnnnnnnnnnnnnnnnnnnnnnnnnnnnnnnnnnnnnnnnnnnnnnnnnnnnnnnnnnnnnnnnnnnnnnnnnnnnnnnnnnnnnnnnnnnnnnnnnnnnnnnnnnnnnnnnnnnnnnnnnnnnnnnnnnnnnnnnnnnnnnnnnnnnnnnnnnnnnnnnnnnnnnnnnnnnnnnnnnnnnnnnnnnnnnnnnnnnnnnnnnnnnnnnnnnnnnnnnnnnnnnnnnnnnnnnnnnnnnnnnnnnnnnnnnnnnnnnnnnnnnnnnnnnnnnnnnnnnnnnnnnnnnnnnnnnnnnnnnnnnnnnnnnnnnnnnnnnnnnnnnnnnnnnnnnnnnnnnnnnnnnnnnnnnnnnnnnnnnnnnnnnnnnnnnnnnnnnnnnnnnnnnnnnnnnnnnnnnnnnnnnnnnnnnnnnnnnnnnnnnnnnnnnnnnnnnnnnnnnnnnnnnnnnnnnnnnnnnnnnnnnnnnnnnnnnnnnnnnnnnnnnnnnnnnnnnnnnnnnnnnnnnnnnnnnnnnnnnnnnnnnnnnnnnnnnnnnnnnnnnnnnnnnnnnnnnnnnnnnnnnnnnnnnnnnnnnnnnnnnnnnnnnnnnnnnnnnnnnnnnnnnnnnnnnnnnnnnnnnnnnnnnnnnnnnnnnnnnnnnnnnnnnnnnnnnnnnnnnnnnnnnnnnnnnnnnnnnnnnnnnnnnnnnnnnnnnnnnnnnnnnnnnnnnnnnnnnnnnnnnnnnnnnnnnnnnnnnnnnnnnnnnnnnnnnnnnnnnnnnnnnnnnnnnnnnnnnnnnnnnnnnnnnnnnnnnnnnnnnnnnnnnnnnnnnnnnnnnnnnnnnnnnnnnnnnnnnnnnnnnnnnnnnnnnnnnnnnnnnnnnnnnnnnnnnnnnnnnnnnnnnnnnnnnnnnnnnnnnnnnnnnnnnnnnnnnnnnnnnnnnnnnnnnnnnnnnnnnnnnnnnnnnnnnnnnnnnnnnnnnnnnnnnnnnnnnnnnnnnnnnnnnnnnnnnnnnnnnnnnnnnnnnnnnnnnnnnnnnnnnnnnnnnnnnnnnnnnnnnnnnnnnnnnnnnnnnnnnnnnnnnnnnnnnnnnnnnnnnnnnnnnnnnnnnnnnnnnnnnnnnnnnnnnnnnnnnnnnnnnnnnnnnnnnnnnnnnnnnnnnnnnnnnnnnnnnnnnnnnnnnnnnnnnnnnnnnnnnnnnnnnnnnnnnnnnnnnnnnnnnnnnnnnnnnnnnnnnnnnnnnnnnnnnnnnnnnnnnnnnnnnnnnnnnnnnnnnnnnnnnnnnnnnnnnnnnnnnnnnnnnnnnnnnnnnnnnnnnnnnnnnnnnnnnnnnnnnnnnnnnnnnnnnnnnnnnnnnnnnnnnnnnnnnnnnnnnnnnnnnnnnnnnnnnnnnnnnnnnnnnnnnnnnnnnnnnnnnnnnnnnnnnnnnnnnnnnnnnnnnnnnnnnnnnnnnnnnnnnnnnnnnnnnnnnnnnnnnnnnnnnnnnnnnnnnnnnnnnnnnnnnnnnnnnnnnnnnnnnnnnnnnnnnnnnnnnnnnnnnnnnnnnnnnnnnnnnnnnnnnnnnnnnnnnnnnnnnnnnnnnnnnnnnnnnnnnnnnnnnnnnnnnnnnnnnnnnnnnnnnnnnnnnnnnnnnnnnnnnnnnnnnnnnnnnnnnnnnnnnnnnnnnnnnnnnnnnnnnnnnnnnnnnnnnnnnnnnnnnnnnnnnnnnnnnnnnnnnnnnnnnnnnnnnnnnnnnnnnnnnnnnnnnnnnnnnnnnnnnnnnnnnnnnnnnnnnnnnnnnnnnnnnnnnnnnnnnnnnnnnnnnnnnnnnnnnnnnnnnnnnnnnnnnnnnnnnnnnnnnnnnnnnnnnnnnnnnnnnnnnnnnnnnnnnnnnnnnnnnnnnnnnnnnnnnnnnnnnnnnnnnnnnnnnnnnnnnnnnnnnnnnnnnnnnnnnnnnnnnnnnnnnnnnnnnnnnnnnnnnnnnnnnnnnnnnnnnnnnnnnnnnnnnnnnnnnnnnnnnnnnnnnnnnnnnnnnnnnnnnnnnnnnnnnnnnnnnnnnnnnnnnnnnnnnnnnnnnnnnnnnnnnnnnnnnnnnnnnnnnnnnnnnnnnnnnnnnnnnnnnnnnnnnnnnnnnnnnnnnnnnnnnnnnnnnnnnnnnnnnnnnnnnnnnnnnnnnnnnnnnnnnnnnnnnnnnnnnnnnnnnnnnnnnnnnnnnnnnnnnnnnnnnnnnnnnnnnnnnnnnnnnnnnnnnnnnnnnnnnnnnnnnnnnnnnnnnnnnnnnnnnnnnnnnnnnnnnnnnnnnnnnnnnnnnnnnnnnnnnnnnnnnnnnnnnnnnnnnnnnnnnnnnnnnnnnnnnnnnnnnnnnnnnnnnnnnnnnnnnnnnnnnnnnnnnnnnnnnnnnnnnnnnnnnnnnnnnnnnnnnnnnnnnnnnnnnnnnnnnnnnnnnnnnnnnnnnnnnnnnnnnnnnnnnnnnnnnnnnnnnnnnnnnnnnnnnnnnnnnnnnnnnnnnnnnnnnnnnnnnnnnnnnnnnnnnnnnnnnnnnnnnnnnnnnnnnnnnnnnnnnnnnnnnnnnnnnnnnnnnnnnnnnnnnnnnnnnnnnnnnnnnnnnnnnnnnnnnnnnnnnnnnnnnnnnnnnnnnnnnnnnnnnnnnnnnnnnnnnnnnnnnnnnnnnnnnnnnnnnnnnnnnnnnnnnnnnnnnnnnnnnnnnnnnnnnnnnnnnnnnnnnnnnnnnnnnnnnnnnnnnnnnnnnnnnnnnnnnnnnnnnnnnnnnnnnnnnnnnnnnnnnnnnnnnnnnnnnnnnnnnnnnnnnnnnnnnnnnnnnnnnnnnnnnnnnnnnnnnnnnnnnnnnnnnnnnnnnnnnnnnnnnnnnnnnnnnnnnnnnnnnnnnnnnnnnnnnnnnnnnnnnnnnnnnnnnnnnnnnnnnnnnnnnnnnnnnnnnnnnnnnnnnnnnnnnnnnnnnnnnnnnnnnnnnnnnnnnnnnnnnnnnnnnnnnnnnnnnnnnnnnnnnnnnnnnnnnnnnnnnnnnnnnnnnnnnnnnnnnnnnnnnnnnnnnnnnnnnnnnnnnnnnnnnnnnnnnnnnnnnnnnnnnnnnnnnnnnnnnnnnnnnnnnnnnnnnnnnnnnnnnnnnnnnnnnnnnnnnnnnnnnnnnnnnnnnnnnnnnnnnnnnnnnnnnnnnnnnnnnnnnnnnnnnnnnnnnnnnnnnnnnnnnnnnnnnnnnnnnnnnnnnnnnnnnnnnnnnnnnnnnnnnnnnnnnnnnnnnnnnnnnnnnnnnnnnnnnnnnnnnnnnnnnnnnnnnnnnnnnnnnnnnnnnnnnnnnnnnnnnnnnnnnnnnnnnnnnnnnnnnnnnnnnnnnnnnnnnnnnnnnnnnnnnnnnnnnnnnnnnnnnnnnnnnnnnnnnnnnnnnnnnnnnnnnnnnnnnnnnnnnnnnnnnnnnnnnnnnnnnnnnnnnnnnnnnnnnnnnnnnnnnnnnnnnnnnnnnnnnnnnnnnnnnnnnnnnnnnnnnnnnnnnnnnnnnnnnnnnnnnnnnnnnnnnnnnnnnnnnnnnnnnnnnnnnnnnnnnnnnnnnnnnnnnnnnnnnnnnnnnnnnnnnnnnnnnnnnnnnnnnnnnnnnnnnnnnnnnnnnnnnnnnnnnnnnnnnnnnnnnnnnnnnnnnnnnnnnnnnnnnnnnnnnnnnnnnnnnnnnnnnnnnnnnnnnnnnnnnnnnnnnnnnnnnnnnnnnnnnnnnnnnnnnnnnnnnnnnnnnnnnnnnnnnnnnnnnnnnnnnnnnnnnnnnnnnnnnnnnnnnnnnnnnnnnnnnnnnnnnnnnnnnnnnnnnnnnnnnnnnnnnnnnnnnnnnnnnnnnnnnnnnnnnnnnnnnnnnnnnnnnnnnnnnnnnnnnnnnnnnnnnnnnnnnnnnnnnnnnnnnnnnnnnnnnnnnnnnnnnnnnnnnnnnnnnnnnnnnnnnnnnnnnnnnnnnnnnnnnnnnnnnnnnnnnnnnnnnnnnnnnnnnnnnnnnnnnnnnnnnnnnnnnnnnnnnnnnnnnnnnnnnnnnnnnnnnnnnnnnnnnnnnnnnnnnnnnnnnnnnnnnnnnnnnnnnnnnnnnnnnnnnnnnnnnnnnnnnnnnnnnnnnnnnnnnnnnnnnnnnnnnnnnnnnnnnnnnnnnnnnnnnnnnnnnnnnnnnnnnnnnnnnnnnnnnnnnnnnnnnnnnnnnnnnnnnnnnnnnnnnnnnnnnnnnnnnnnnnnnnnnnnnnnnnnnnnnnnnnnnnnnnnnnnnnnnnnnnnnnnnnnnnnnnnnnnnnnnnnnnnnnnnnnnnnnnnnnnnnnnnnnnnnnnnnnnnnnnnnnnnnnnnnnnnnnnnnnnnnnnnnnnnnnnnnnnnnnnnnnnnnnnnnnnnnnnnnnnnnnnnnnnnnnnnnnnnnnnnnnnnnnnnnnnnnnnnnnnnnnnnnnnnnnnnnnnnnnnnnnnnnnnnnnnnnnnnnnnnnnnnnnnnnnnnnnnnnnnnnnnnnnnnnnnnnnnnnnnnnnnnnnnnnnnnnnnnnnnnnnnnnnnnnnnnnnnnnnnnnnnnnnnnnnnnnnnnnnnnnnnnnnnnnnnnnnnnnnnnnnnnnnnnnnnnnnnnnnnnnnnnnnnnnnnnnnnnnnnnnnnnnnnnnnnnnnnnnnnnnnnnnnnnnnnnnnnnnnnnnnnnnnnnnnnnnnnnnnnnnnnnnnnnnnnnnnnnnnnnnnnnnnnnnnnnnnnnnnnnnnnnnnnnnnnnnnnnnnnnnnnnnnnnnnnnnnnnnnnnnnnnnnnnnnnnnnnnnnnnnnnnnnnnnnnnnnnnnnnnnnnnnnnnnnnnnnnnnnnnnnnnnnnnnnnnnnnnnnnnnnnnnnnnnnnnnnnnnnnnnnnnnnnnnnnnnnnnnnnnnnnnnnnnnnnnnnnnnnnnnnnnnnnnnnnnnnnnnnnnnnnnnnnnnnnnnnnnnnnnnnnnnnnnnnnnnnnnnnnnnnnnnnnnnnnnnnnnnnnnnnnnnnnnnnnnnnnnnnnnnnnnnnnnnnnnnnnnnnnnnnnnnnnnnnnnnnnnnnnnnnnnnnnnnnnnnnnnnnnnnnnnnnnnnnnnnnnnnnnnnnnnnnnnnnnnnnnnnnnnnnnnnnnnnnnnnnnnnnnnnnnnnnnnnnnnnnnnnnnnnnnnnnnnnnnnnnnnnnnnnnnnnnnnnnnnnnnnnnnnnnnnnnnnnnnnnnnnnnnnnnnnnnnnnnnnnnnnnnnnnnnnnnnnnnnnnnnnnnnnnnnnnnnnnnnnnnnnnnnnnnnnnnnnnnnnnnnnnnnnnnnnnnnnnnnnnnnnnnnnnnnnnnnnnnnnnnnnnnnnnnnnnnnnnnnnnnnnnnnnnnnnnnnnnnnnnnnnnnnnnnnnnnnnnnnnnnnnnnnnnnnnnnnnnnnnnnnnnnnnnnnnnnnnnnnnnnnnnnnnnnnnnnnnnnnnnnnnnnnnnnnnnnnnnnnnnnnnnnnnnnnnnnnnnnnnnnnnnnnnnnnnnnnnnnnnnnnnnnnnnnnnnnnnnnnnnnnnnnnnnnnnnnnnnnnnnnnnnnnnnnnnnnnnnnnnnnnnnnnnnnnnnnnnnnnnnnnnnnnnnnnnnnnnnnnnnnnnnnnnnnnnnnnnnnnnnnnnnnnnnnnnnnnnnnnnnnnnnnnnnnnnnnnnnnnnnnnnnnnnnnnnnnnnnnnnnnnnnnnnnnnnnnnnnnnnnnnnnnnnnnnnnnnnnnnnnnnnnnnnnnnnnnnnnnnnnnnnnnnnnnnnnnnnnnnnnnnnnnnnnnnnnnnnnnnnnnnnnnnnnnnnnnnnnnnnnnnnnnnnnnnnnnnnnnnnnnnnnnnnnnnnnnnnnnnnnnnnnnnnnnnnnnnnnnnnnnnnnnnnnnnnnnnnnnnnnnnnnnnnnnnnnnnnnnnnnnnnnnnnnnnnnnnnnnnnnnnnnnnnnnnnnnnnnnnnnnnnnnnnnnnnnnnnnnnnnnnnnnnnnnnnnnnnnnnnnnnnnnnnnnnnnnnnnnnnnnnnnnnnnnnnnnnnnnnnnnnnnnnnnnnnnnnnnnnnnnnnnnnnnnnnnnnnnnnnnnnnnnnnnnnnnnnnnnnnnnnnnnnnnnnnnnnnnnnnnnnnnnnnnnnnnnnnnnnnnnnnnnnnnnnnnnnnnnnnnnnnnnnnnnnnnnnnnnnnnnnnnnnnnnnnnnnnnnnnnnnnnnnnnnnnnnnnnnnnnnnnnnnnnnnnnnnnnnnnnnnnnnnnnnnnnnnnnnnnnnnnnnnnnnnnnnnnnnnnnnnnnnnnnnnnnnnnnnnnnnnnnnnnnnnnnnnnnnnnnnnnnnnnnnnnnnnnnnnnnnnnnnnnnnnnnnnnnnnnnnnnnnnnnnnnnnnnnnnnnnnnnnnnnnnnnnnnnnnnnnnnnnnnnnnnnnnnnnnnnnnnnnnnnnnnnnnnnnnnnnnnnnnnnnnnnnnnnnnnnnnnnnnnnnnnnnnnnnnnnnnnnnnnnnnnnnnnnnnnnnnnnnnnnnnnnnnnnnnnnnnnnnnnnnnnnnnnnnnnnnnnnnnnnnnnnnnnnnnnnnnnnnnnnnnnnnnnnnnnnnnnnnnnnnnnnnnnnnnnnnnnnnnnnnnnnnnnnnnnnnnnnnnnnnnnnnnnnnnnnnnnnnnnnnnnnnnnnnnnnnnnnnnnnnnnnnnnnnnnnnnnnnnnnnnnnnnnnnnnnnnnnnnnnnnnnnnnnnnnnnnnnnnnnnnnnnnnnnnnnnnnnnnnnnnnnnnnnnnnnnnnnnnnnnnnnnnnnnnnnnnnnnnnnnnnnnnnnnnnnnnnnnnnnnnnnnnnnnnnnnnnnnnnnnnnnnnnnnnnnnnnnnnnnnnnnnnnnnnnnnnnnnnnnnnnnnnnnnnnnnnnnnnnnnnnnnnnnnnnnnnnnnnnnnnnnnnnnnnnnnnnnnnnnnnnnnnnnnnnnnnnnnnnnnnnnnnnnnnnnnnnnnnnnnnnnnnnnnnnnnnnnnnnnnnnnnnnnnnnnnnnnnnnnnnnnnnnnnnnnnnnnnnnnnnnnnnnnnnnnnnnnnnnnnnnnnnnnnnnnnnnnnnnnnnnnnnnnnnnnnnnnnnnnnnnnnnnnnnnnnnnnnnnnnnnnnnnnnnnnnnnnnnnnnnnnnnnnnnnnnnnnnnnnnnnnnnnnnnnnnnnnnnnnnnnnnnnnnnnnnnnnnnnnnnnnnnnnnnnnnnnnnnnnnnnnnnnnnnnnnnnnnnnnnnnnnnnnnnnnnnnnnnnnnnnnnnnnnnnnnnnnnnnnnnnnnnnnnnnnnnnnnnnnnnnnnnnnnnnnnnnnnnnnnnnnnnnnnnnnnnnnnnnnnnnnnnnnnnnnnnnnnnnnnnnnnnnnnnnnnnnnnnnnnnnnnnnnnnnnnnnnnnnnnnnnnnnnnnnnnnnnnnnnnnnnnnnnnnnnnnnnnnnnnnnnnnnnnnnnnnnnnnnnnnnnnnnnnnnnnnnnnnnnnnnnnnnnnnnnnnnnnnnnnnnnnnnnnnnnnnnnnnnnnnnnnnnnnnnnnnnnnnnnnnnnnnnnnnnnnnnnnnnnnnnnnnnnnnnnnnnnnnnnnnnnnnnnnnnnnnnnnnnnnnnnnnnnnnnnnnnnnnnnnnnnnnnnnnnnnnnnnnnnnnnnnnnnnnnnnnnnnnnnnnnnnnnnnnnnnnnnnnnnnnnnnnnnnnnnnnnnnnnnnnnnnnnnnnnnnnnnnnnnnnnnnnnnnnnnnnnnnnnnnnnnnnnnnnnnnnnnnnnnnnnnnnnnnnnnnnnnnnnnnnnnnnnnnnnnnnnnnnnnnnnnnnnnnnnnnnnnnnnnnnnnnnnnnnnnnnnnnnnnnnnnnnnnnnnnnnnnnnnnnnnnnnnnnnnnnnnnnnnnnnnnnnnnnnnnnnnnnnnnnnnnnnnnnnnnnnnnnnnnnnnnnnnnnnnnnnnnnnnnnnnnnnnnnnnnnnnnnnnnnnnnnnnnnnnnnnnnnnnnnnnnnnnnnnnnnnnnnnnnnnnnnnnnnnnnnnnnnnnnnnnnnnnnnnnnnnnnnnnnnnnnnnnnnnnnnnnnnnnnnnnnnnnnnnnnnnnnnnnnnnnnnnnnnnnnnnnnnnnnnnnnnnnnnnnnnnnnnnnnnnnnnnnnnnnnnnnnnnnnnnnnnnnnnnnnnnnnnnnnnnnnnnnnnnnnnnnnnnnnnnnnnnnnnnnnnnnnnnnnnnnnnnnnnnnnnnnnnnnnnnnnnnnnnnnnnnnnnnnnnnnnnnnnnnnnnnnnnnnnnnnnnnnnnnnnnnnnnnnnnnnnnnnnnnnnnnnnnnnnnnnnnnnnnnnnnnnnnnnnnnnnnnnnnnnnnnnnnnnnnnnnnnnnnnnnnnnnnnnnnnnnnnnnnnnnnnnnnnnnnnnnnnnnnnnnnnnnnnnnnnnnnnnnnnnnnnnnnnnnnnnnnnnnnnnnnnnnnnnnnnnnnnnnnnnnnnnnnnnnnnnnnnnnnnnnnnnnnnnnnnnnnnnnnnnnnnnnnnnnnnnnnnnnnnnnnnnnnnnnnnnnnnnnnnnnnnnnnnnnnnnnnnnnnnnnnnnnnnnnnnnnnnnnnnnnnnnnnnnnnnnnnnnnnnnnnnnnnnnnnnnnnnnnnnnnnnnnnnnnnnnnnnnnnnnnnnnnnnnnnnnnnnnnnnnnnnnnnnnnnnnnnnnnnnnnnnnnnnnnnnnnnnnnnnnnnnnnnnnnnnnnnnnnnnnnnnnnnnnnnnnnnnnnnnnnnnnnnnnnnnnnnnnnnnnnnnnnnnnnnnnnnnnnnnnnnnnnnnnnnnnnnnnnnnnnnnnnnnnnnnnnnnnnnnnnnnnnnnnnnnnnnnnnnnnnnnnnnnnnnnnnnnnnnnnnnnnnnnnnnnnnnnnnnnnnnnnnnnnnnnnnnnnnnnnnnnnnnnnnnnnnnnnnnnnnnnnnnnnnnnnnnnnnnnnnnnnnnnnnnnnnnnnnnnnnnnnnnnnnnnnnnnnnnnnnnnnnnnnnnnnnnnnnnnnnnnnnnnnnnnnnnnnnnnnnnnnnnnnnnnnnnnnnnnnnnnnnnnnnnnnnnnnnnnnnnnnnnnnnnnnnnnnnnnnnnnnnnnnnnnnnnnnnnnnnnnnnnnnnnnnnnnnnnnnnnnnnnnnnnnnnnnnnnnnnnnnnnnnnnnnnnnnnnnnnnnnnnnnnnnnnnnnnnnnnnnnnnnnnnnnnnnnnnnnnnnnnnnnnnnnnnnnnnnnnnnnnnnnnnnnnnnnnnnnnnnnnnnnnnnnnnnnnnnnnnnnnnnnnnnnnnnnnnnnnnnnnnnnnnnnnnnnnnnnnnnnnnnnnnnnnnnnnnnnnnnnnnnnnnnnnnnnnnnnnnnnnnnnnnnnnnnnnnnnnnnnnnnnnnnnnnnnnnnnnnnnnnnnnnnnnnnnnnnnnnnnnnnnnnnnnnnnnnnnnnnnnnnnnnnnnnnnnnnnnnnnnnnnnnnnnnnnnnnnnnnnnnnnnnnnnnnnnnnnnnnnnnnnnnnnnnnnnnnnnnnnnnnnnnnnnnnnnnnnnnnnnnnnnnnnnnnnnnnnnnnnnnnnnnnnnnnnnnnnnnnnnnnnnnnnnnnnnnnnnnnnnnnnnnnnnnnnnnnnnnnnnnnnnnnnnnnnnnnnnnnnnnnnnnnnnnnnnnnnnnnnnnnnnnnnnnnnnnnnnnnnnnnnnnnnnnnnnnnnnnnnnnnnnnnnnnnnnnnnnnnnnnnnnnnnnnnnnnnnnnnnnnnnnnnnnnnnnnnnnnnnnnnnnnnnnnnnnnnnnnnnnnnnnnnnnnnnnnnnnnnnnnnnnnnnnnnnnnnnnnnnnnnnnnnnnnnnnnnnnnnnnnnnnnnnnnnnnnnnnnnnnnnnnnnnnnnnnnnnnnnnnnnnnnnnnnnnnnnnnnnnnnnnnnnnnnnnnnnnnnnnnnnnnnnnnnnnnnnnnnnnnnnnnnnnnnnnnnnnnnnnnnnnnnnnnnnnnnnnnnnnnnnnnnnnnnnnnnnnnnnnnnnnnnnnnnnnnnnnnnnnnnnnnnnnnnnnnnnnnnnnnnnnnnnnnnnnnnnnnnnnnnnnnnnnnnnnnnnnnnnnnnnnnnnnnnnnnnnnnnnnnnnnnnnnnnnnnnnnnnnnnnnnnnnnnnnnnnnnnnnnnnnnnnnnnnnnnnnnnnnnnnnnnnnnnnnnnnnnnnnnnnnnnnnnnnnnnnnnnnnnnnnnnnnnnnnnnnnnnnnnnnnnnnnnnnnnnnnnnnnnnnnnnnnnnnnnnnnnnnnnnnnnnnnnnnnnnnnnnnnnnnnnnnnnnnnnnnnnnnnnnnnnnnnnnnnnnnnnnnnnnnnnnnnnnnnnnnnnnnnnnnnnnnnnnnnnnnnnnnnnnnnnnnnnnnnnnnnnnnnnnnnnnnnnnnnnnnnnnnnnnnnnnnnnnnnnnnnnnnnnnnnnnnnnnnnnnnnnnnnnnnnnnnnnnnnnnnnnnnnnnnnnnnnnnnnnnnnnnnnnnnnnnnnnnnnnnnnnnnnnnnnnnnnnnnnnnnnnnnnnnnnnnnnnnnnnnnnnnnnnnnnnnnnnnnnnnnnnnnnnnnnnnnnnnnnnnnnnnnnnnnnnnnnnnnnnnnnnnnnnnnnnnnnnnnnnnnnnnnnnnnnnnnnnnnnnnnnnnnnnnnnnnnnnnnnnnnnnnnnnnnnnnnnnnnnnnnnnnnnnnnnnnnnnnnnnnnnnnnnnnnnnnnnnnnnnnnnnnnnnnnnnnnnnnnnnnnnnnnnnnnnnnnnnnnnnnnnnnnnnnnnnnnnnnnnnnnnnnnnnnnnnnnnnnnnnnnnnnnnnnnnnnnnnnnnnnnnnnnnnnnnnnnnnnnnnnnnnnnnnnnnnnnnnnnnnnnnnnnnnnnnnnnnnnnnnnnnnnnnnnnnnnnnnnnnnnnnnnnnnnnnnnnnnnnnnnnnnnnnnnnnnnnnnnnnnnnnnnnnnnnnnnnnnnnnnnnnnnnnnnnnnnnnnnnnnnnnnnnnnnnnnnnnnnnnnnnnnnnnnnnnnnnnnnnnnnnnnnnnnnnnnnnnnnnnnnnnnnnnnnnnnnnnnnnnnnnnnnnnnnnnnnnnnnnnnnnnnnnnnnnnnnnnnnnnnnnnnnnnnnnnnnnnnnnnnnnnnnnnnnnnnnnnnnnnnnnnnnnnnnnnnnnnnnnnnnnnnnnnnnnnnnnnnnnnnnnnnnnnnnnnnnnnnnnnnnnnnnnnnnnnnnnnnnnnnnnnnnnnnnnnnnnnnnnnnnnnnnnnnnnnnnnnnnnnnnnnnnnnnnnnnnnnnnnnnnnnnnnnnnnnnnnnnnnnnnnnnnnnnnnnnnnnnnnnnnnnnnnnnnnnnnnnnnnnnnnnnnnnnnnnnnnnnnnnnnnnnnnnnnnnnnnnnnnnnnnnnnnnnnnnnnnnnnnnnnnnnnnnnnnnnnnnnnnnnnnnnnnnnnnnnnnnnnnnnnnnnnnnnnnnnnnnnnnnnnnnnnnnnnnnnnnnnnnnnnnnnnnnnnnnnnnnnnnnnnnnnnnnnnnnnnnnnnnnnnnnnnnnnnnnnnnnnnnnnnnnnnnnnnnnnnnnnnnnnnnnnnnnnnnnnnnnnnnnnnnnnnnnnnnnnnnnnnnnnnnnnnnnnnnnnnnnnnnnnnnnnnnnnnnnnnnnnnnnnnnnnnnnnnnnnnnnnnnnnnnnnnnnnnnnnnnnnnnnnnnnnnnnnnnnnnnnnnnnnnnnnnnnnnnnnnnnnnnnnnnnnnnnnnnnnnnnnnnnnnnnnnnnnnnnnnnnnnnnnnnnnnnnnnnnnnnnnnnnnnnnnnnnnnnnnnnnnnnnnnnnnnnnnnnnnnnnnnnnnnnnnnnnnnnnnnnnnnnnnnnnnnnnnnnnnnnnnnnnnnnnnnnnnnnnnnnnnnnnnnnnnnnnnnnnnnnnnnnnnnnnnnnnnnnnnnnnnnnnnnnnnnnnnnnnnnnnnnnnnnnnnnnnnnnnnnnnnnnnnnnnnnnnnnnnnnnnnnnnnnnnnnnnnnnnnnnnnnnnnnnnnnnnnnnnnnnnnnnnnnnnnnnnnnnnnnnnnnnnnnnnnnnnnnnnnnnnnnnnnnnnnnnnnnnnnnnnnnnnnnnnnnnnnnnnnnnnnnnnnnnnnnnnnnnnnnnnnnnnnnnnnnnnnnnnnnnnnnnnnnnnnnnnnnnnnnnnnnnnnnnnnnnnnnnnnnnnnnnnnnnnnnnnnnnnnnnnnnnnnnnnnnnnnnnnnnnnnnnnnnnnnnnnnnnnnnnnnnnnnnnnnnnnnnnnnnnnnnnnnnnnnnnnnnnnnnnnnnnnnnnnnnnnnnnnnnnnnnnnnnnnnnnnnnnnnnnnnnnnnnnnnnnnnnnnnnnnnnnnnnnnnnnnnnnnnnnnnnnnnnnnnnnnnnnnnnnnnnnnnnnnnnnnnnnnnnnnnnnnnnnnnnnnnnnnnnnnnnnnnnnnnnnnnnnnnnnnnnnnnnnnnnnnnnnnnnnnnnnnnnnnnnnnnnnnnnnnnnnnnnnnnnnnnnnnnnnnnnnnnnnnnnnnnnnnnnnnnnnnnnnnnnnnnnnnnnnnnnnnnnnnnnnnnnnnnnnnnnnnnnnnnnnnnnnnnnnnnnnnnnnnnnnnnnnnnnnnnnnnnnnnnnnnnnnnnnnnnnnnnnnnnnnnnnnnnnnnnnnnnnnnnnnnnnnnnnnnnnnnnnnnnnnnnnnnnnnnnnnnnnnnnnnnnnnnnnnnnnnnnnnnnnnnnnnnnnnnnnnnnnnnnnnnnnnnnnnnnnnnnnnnnnnnnnnnnnnnnnnnnnnnnnnnnnnnnnnnnnnnnnnnnnnnnnnnnnnnnnnnnnnnnnnnnnnnnnnnnnnnnnnnnnnnnnnnnnnnnnnnnnnnnnnnnnnnnnnnnnnnnnnnnnnnnnnnnnnnnnnnnnnnnnnnnnnnnnnnnnnnnnnnnnnnnnnnnnnnnnnnnnnnnnnnnnnnnnnnnnnnnnnnnnnnnnnnnnnnnnnnnnnnnnnnnnnnnnnnnnnnnnnnnnnnnnnnnnnnnnnnnnnnnnnnnnnnnnnnnnnnnnnnnnnnnnnnnnnnnnnnnnnnnnnnnnnnnnnnnnnnnnnnnnnnnnnnnnnnnnnnnnnnnnnnnnnnnnnnnnnnnnnnnnnnnnnnnnnnnnnnnnnnnnnnnnnnnnnnnnnnnnnnnnnnnnnnnnnnnnnnnnnnnnnnnnnnnnnnnnnnnnnnnnnnnnnnnnnnnnnnnnnnnnnnnnnnnnnnnnnnnnnnnnnnnnnnnnnnnnnnnnnnnnnnnnnnnnnnnnnnnnnnnnnnnnnnnnnnnnnnnnnnnnnnnnnnnnnnnnnnnnnnnnnnnnnnnnnnnnnnnnnnnnnnnnnnnnnnnnnnnnnnnnnnnnnnnnnnnnnnnnnnnnnnnnnnnnnnnnnnnnnnnnnnnnnnnnnnnnnnnnnnnnnnnnnnnnnnnnnnnnnnnnnnnnnnnnnnnnnnnnnnnnnnnnnnnnnnnnnnnnnnnnnnnnnnnnnnnnnnnnnnnnnnnnnnnnnnnnnnnnnnnnnnnnnnnnnnnnnnnnnnnnnnnnnnnnnnnnnnnnnnnnnnnnnnnnnnnnnnnnnnnnnnnnnnnnnnnnnnnnnnnnnnnnnnnnnnnnnnnnnnnnnnnnnnnnnnnnnnnnnnnnnnnnnnnnnnnnnnnnnnnnnnnnnnnnnnnnnnnnnnnnnnnnnnnnnnnnnnnnnnnnnnnnnnnnnnnnnnnnnnnnnnnnnnnnnnnnnnnnnnnnnnnnnnnnnnnnnnnnnnnnnnnnnnnnnnnnnnnnnnnnnnnnnnnnnnnnnnnnnnnnnnnnnnnnnnnnnnnnnnnnnnnnnnnnnnnnnnnnnnnnnnnnnnnnnnnnnnnnnnnnnnnnnnnnnnnnnnnnnnnnnnnnnnnnnnnnnnnnnnnnnnnnnnnnnnnnnnnnnnnnnnnnnnnnnnnnnnnnnnnnnnnnnnnnnnnnnnnnnnnnnnnnnnnnnnnnnnnnnnnnnnnnnnnnnnnnnnnnnnnnnnnnnnnnnnnnnnnnnnnnnnnnnnnnnnnnnnnnnnnnnnnnnnnnnnnnnnnnnnnnnnnnnnnnnnnnnnnnnnnnnnnnnnnnnnnnnnnnnnnnnnnnnnnnnnnnnnnnnnnnnnnnnnnnnnnnnnnnnnnnnnnnnnnnnnnnnnnnnnnnnnnnnnnnnnnnnnnnnnnnnnnnnnnnnnnnnnnnnnnnnnnnnnnnnnnnnnnnnnnnnnnnnnnnnnnnnnnnnnnnnnnnnnnnnnnnnnnnnnnnnnnnnnnnnnnnnnnnnnnnnnnnnnnnnnnnnnnnnnnnnnnnnnnnnnnnnnnnnnnnnnnnnnnnnnnnnnnnnnnnnnnnnnnnnnnnnnnnnnnnnnnnnnnnnnnnnnnnnnnnnnnnnnnnnnnnnnnnnnnnnnnnnnnnnnnnnnnnnnnnnnnnnnnnnnnnnnnnnnnnnnnnnnnnnnnnnnnnnnnnnnnnnnnnnnnnnnnnnnnnnnnnnnnnnnnnnnnnnnnnnnnnnnnnnnnnnnnnnnnnnnnnnnnnnnnnnnnnnnnnnnnnnnnnnnnnnnnnnnnnnnnnnnnnnnnnnnnnnnnnnnnnnnnnnnnnnnnnnnnnnnnnnnnnnnnnnnnnnnnnnnnnnnnnnnnnnnnnnnnnnnnnnnnnnnnnnnnnnnnnnnnnnnnnnnnnnnnnnnnnnnnnnnnnnnnnnnnnnnnnnnnnnnnnnnnnnnnnnnnnnnnnnnnnnnnnnnnnnnnnnnnnnnnnnnnnnnnnnnnnnnnnnnnnnnnnnnnnnnnnnnnnnnnnnnnnnnnnnnnnnnnnnnnnnnnnnnnnnnnnnnnnnnnnnnnnnnnnnnnnnnnnnnnnnnnnnnnnnnnnnnnnnnnnnnnnnnnnnnnnnnnnnnnnnnnnnnnnnnnnnnnnnnnnnnnnnnnnnnnnnnnnnnnnnnnnnnnnnnnnnnnnnnnnnnnnnnnnnnnnnnnnnnnnnnnnnnnnnnnnnnnnnnnnnnnnnnnnnnnnnnnnnnnnnnnnnnnnnnnnnnnnnnnnnnnnnnnnnnnnnnnnnnnnnnnnnnnnnnnnnnnnnnnnnnnnnnnnnnnnnnnnnnnnnnnnnnnnnnnnnnnnnnnnnnnnnnnnnnnnnnnnnnnnnnnnnnnnnnnnnnnnnnnnnnnnnnnnnnnnnnnnnnnnnnnnnnnnnnnnnnnnnnnnnnnnnnnnnnnnnnnnnnnnnnnnnnnnnnnnnnnnnnnnnnnnnnnnnnnnnnnnnnnnnnnnnnnnnnnnnnnnnnnnnnnnnnnnnnnnnnnnnnnnnnnnnnnnnnnnnnnnnnnnnnnnnnnnnnnnnnnnnnnnnnnnnnnnnnnnnnnnnnnnnnnnnnnnnnnnnnnnnnnnnnnnnnnnnnnnnnnnnnnnnnnnnnnnnnnnnnnnnnnnnnnnnnnnnnnnnnnnnnnnnnnnnnnnnnnnnnnnnnnnnnnnnnnnnnnnnnnnnnnnnnnnnnnnnnnnnnnnnnnnnnnnnnnnnnnnnnnnnnnnnnnnnnnnnnnnnnnnnnnnnnnnnnnnnnnnnnnnnnnnnnnnnnnnnnnnnnnnnnnnnnnnnnnnnnnnnnnnnnnnnnnnnnnnnnnnnnnnnnnnnnnnnnnnnnnnnnnnnnnnnnnnnnnnnnnnnnnnnnnnnnnnnnnnnnnnnnnnnnnnnnnnnnnnnnnnnnnnnnnnnnnnnnnnnnnnnnnnnnnnnnnnnnnnnnnnnnnnnnnnnnnnnnnnnnnnnnnnnnnnnnnnnnnnnnnnnnnnnnnnnnnnnnnnnnnnnnnnnnnnnnnnnnnnnnnnnnnnnnnnnnnnnnnnnnnnnnnnnnnnnnnnnnnnnnnnnnnnnnnnnnnnnnnnnnnnnnnnnnnnnnnnnnnnnnnnnnnnnnnnnnnnnnnnnnnnnnnnnnnnnnnnnnnnnnnnnnnnnnnnnnnnnnnnnnnnnnnnnnnnnnnnnnnnnnnnnnnnnnnnnnnnnnnnnnnnnnnnnnnnnnnnnnnnnnnnnnnnnnnnnnnnnnnnnnnnnnnnnnnnnnnnnnnnnnnnnnnnnnnnnnnnnnnnnnnnnnnnnnnnnnnnnnnnnnnnnnnnnnnnnnnnnnnnnnnnnnnnnnnnnnnnnnnnnnnnnnnnnnnnnnnnnnnnnnnnnnnnnnnnnnnnnnnnnnnnnnnnnnnnnnnnnnnnnnnnnnnnnnnnnnnnnnnnnnnnnnnnnnnnnnnnnnnnnnnnnnnnnnnnnnnnnnnnnnnnnnnnnnnnnnnnnnnnnnnnnnnnnnnnnnnnnnnnnnnnnnnnnnnnnnnnnnnnnnnnnnnnnnnnnnnnnnnnnnnnnnnnnnnnnnnnnnnnnnnnnnnnnnnnnnnnnnnnnnnnnnnnnnnnnnnnnnnnnnnnnnnnnnnnnnnnnnnnnnnnnnnnnnnnnnnnnnnnnnnnnnnnnnnnnnnnnnnnnnnnnnnnnnnnnnnnnnnnnnnnnnnnnnnnnnnnnnnnnnnnnnnnnnnnnnnnnnnnnnnnnnnnnnnnnnnnnnnnnnnnnnnnnnnnnnnnnnnnnnnnnnnnnnnnnnnnnnnnnnnnnnnnnnnnnnnnnnnnnnnnnnnnnnnnnnnnnnnnnnnnnnnnnnnnnnnnnnnnnnnnnnnnnnnnnnnnnnnnnnnnnnnnnnnnnnnnnnnnnnnnnnnnnnnnnnnnnnnnnnnnnnnnnnnnnnnnnnnnnnnnnnnnnnnnnnnnnnnnnnnnnnnnnnnnnnnnnnnnnnnnnnnnnnnnnnnnnnnnnnnnnnnnnnnnnnnnnnnnnnnnnnnnnnnnnnnnnnnnnnnnnnnnnnnnnnnnnnnnnnnnnnnnnnnnnnnnnnnnnnnnnnnnnnnnnnnnnnnnnnnnnnnnnnnnnnnnnnnnnnnnnnnnnnnnnnnnnnnnnnnnnnnnnnnnnnnnnnnnnnnnnnnnnnnnnnnnnnnnnnnnnnnnnnnnnnnnnnnnnnnnnnnnnnnnnnnnnnnnnnnnnnnnnnnnnnnnnnnnnnnnnnnnnnnnnnnnnnnnnnnnnnnnnnnnnnnnnnnnnnnnnnnnnnnnnnnnnnnnnnnnnnnnnnnnnnnnnnnnnnnnnnnnnnnnnnnnnnnnnnnnnnnnnnnnnnnnnnnnnnnnnnnnnnnnnnnnnnnnnnnnnnnnnnnnnnnnnnnnnnnnnnnnnnnnnnnnnnnnnnnnnnnnnnnnnnnnnnnnnnnnnnnnnnnnnnnnnnnnnnnnnnnnnnnnnnnnnnnnnnnnnnnnnnnnnnnnnnnnnnnnnnnnnnnnnnnnnnnnnnnnnnnnnnnnnnnnnnnnnnnnnnnnnnnnnnnnnnnnnnnnnnnnnnnnnnnnnnnnnnnnnnnnnnnnnnnnnnnnnnnnnnnnnnnnnnnnnnnnnnnnnnnnnnnnnnnnnnnnnnnnnnnnnnnnnnnnnnnnnnnnnnnnnnnnnnnnnnnnnnnnnnnnnnnnnnnnnnnnnnnnnnnnnnnnnnnnnnnnnnnnnnnnnnnnnnnnnnnnnnnnnnnnnnnnnnnnnnnnnnnnnnnnnnnnnnnnnnnnnnnnnnnnnnnnnnnnnnnnnnnnnnnnnnnnnnnnnnnnnnnnnnnnnnnnnnnnnnnnnnnnnnnnnnnnnnnnnnnnnnnnnnnnnnnnnnnnnnnnnnnnnnnnnnnnnnnnnnnnnnnnnnnnnnnnnnnnnnnnnnnnnnnnnnnnnnnnnnnnnnnnnnnnnnnnnnnnnnnnnnnnnnnnnnnnnnnnnnnnnnnnnnnnnnnnnnnnnnnnnnnnnnnnnnnnnnnnnnnnnnnnnnnnnnnnnnnnnnnnnnnnnnnnnnnnnnnnnnnnnnnnnnnnnnnnnnnnnnnnnnnnnnnnnnnnnnnnnnnnnnnnnnnnnnnnnnnnnnnnnnnnnnnnnnnnnnnnnnnnnnnnnnnnnnnnnnnnnnnnnnnnnnnnnnnnnnnnnnnnnnnnnnnnnnnnnnnnnnnnnnnnnnnnnnnnnnnnnnnnnnnnnnnnnnnnnnnnnnnnnnnnnnnnnnnnnnnnnnnnnnnnnnnnnnnnnnnnnnnnnnnnnnnnnnnnnnnnnnnnnnnnnnnnnnnnnnnnnnnnnnnnnnnnnnnnnnnnnnnnnnnnnnnnnnnnnnnnnnnnnnnnnnnnnnnnnnnnnnnnnnnnnnnnnnnnnnnnnnnnnnnnnnnnnnnnnnnnnnnnnnnnnnnnnnnnnnnnnnnnnnnnnnnnnnnnnnnnnnnnnnnnnnnnnnnnnnnnnnnnnnnnnnnnnnnnnnnnnnnnnnnnnnnnnnnnnnnnnnnnnnnnnnnnnnnnnnnnnnnnnnnnnnnnnnnnnnnnnnnnnnnnnnnnnnnnnnnnnnnnnnnnnnnnnnnnnnnnnnnnnnnnnnnnnnnnnnnnnnnnnnnnnnnnnnnnnnnnnnnnnnnnnnnnnnnnnnnnnnnnnnnnnnnnnnnnnnnnnnnnnnnnnnnnnnnnnnnnnnnnnnnnnnnnnnnnnnnnnnnnnnnnnnnnnnnnnnnnnnnnnnnnnnnnnnnnnnnnnnnnnnnnnnnnnnnnnnnnnnnnnnnnnnnnnnnnnnnnnnnnnnnnnnnnnnnnnnnnnnnnnnnnnnnnnnnnnnnnnnnnnnnnnnnnnnnnnnnnnnnnnnnnnnnnnnnnnnnnnnnnnnnnnnnnnnnnnnnnnnnnnnnnnnnnnnnnnnnnnnnnnnnnnnnnnnnnnnnnnnnnnnnnnnnnnnnnnnnnnnnnnnnnnnnnnnnnnnnnnnnnnnnnnnnnnnnnnnnnnnnnnnnnnnnnnnnnnnnnnnnnnnnnnnnnnnnnnnnnnnnnnnnnnnnnnnnnnnnnnnnnnnnnnnnnnnnnnnnnnnnnnnnnnnnnnnnnnnnnnnnnnnnnnnnnnnnnnnnnnnnnnnnnnnnnnnnnnnnnnnnnnnnnnnnnnnnnnnnnnnnnnnnnnnnnnnnnnnnnnnnnnnnnnnnnnnnnnnnnnnnnnnnnnnnnnnnnnnnnnnnnnnnnnnnnnnnnnnnnnnnnnnnnnnnnnnnnnnnnnnnnnnnnnnnnnnnnnnnnnnnnnnnnnnnnnnnnnnnnnnnnnnnnnnnnnnnnnnnnnnnnnnnnnnnnnnnnnnnnnnnnnnnnnnnnnnnnnnnnnnnnnnnnnnnnnnnnnnnnnnnnnnnnnnnnnnnnnnnnnnnnnnnnnnnnnnnnnnnnnnnnnnnnnnnnnnnnnnnnnnnnnnnnnnnnnnnnnnnnnnnnnnnnnnnnnnnnnnnnnnnnnnnnnnnnnnnnnnnnnnnnnnnnnnnnnnnnnnnnnnnnnnnnnnnnnnnnnnnnnnnnnnnnnnnnnnnnnnnnnnnnnnnnnnnnnnnnnnnnnnnnnnnnnnnnnnnnnnnnnnnnnnnnnnnnnnnnnnnnnnnnnnnnnnnnnnnnnnnnnnnnnnnnnnnnnnnnnnnnnnnnnnnnnnnnnnnnnnnnnnnnnnnnnnnnnnnnnnnnnnnnnnnnnnnnnnnnnnnnnnnnnnnnnnnnnnnnnnnnnnnnnnnnnnnnnnnnnnnnnnnnnnnnnnnnnnnnnnnnnnnnnnnnnnnnnnnnnnnnnnnnnnnnnnnnnnnnnnnnnnnnnnnnnnnnnnnnnnnnnnnnnnnnnnnnnnnnnnnnnnnnnnnnnnnnnnnnnnnnnnnnnnnnnnnnnnnnnnnnnnnnnnnnnnnnnnnnnnnnnnnnnnnnnnnnnnnnnnnnnnnnnnnnnnnnnnnnnnnnnnnnnnnnnnnnnnnnnnnnnnnnnnnnnnnnnnnnnnnnnnnnnnnnnnnnnnnnnnnnnnnnnnnnnnnnnnnnnnnnnnnnnnnnnnnnnnnnnnnnnnnnnnnnnnnnnnnnnnnnnnnnnnnnnnnnnnnnnnnnnnnnnnnnnnnnnnnnnnnnnnnnnnnnnnnnnnnnnnnnnnnnnnnnnnnnnnnnnnnnnnnnnnnnnnnnnnnnnnnnnnnnnnnnnnnnnnnnnnnnnnnnnnnnnnnnnnnnnnnnnnnnnnnnnnnnnnnnnnnnnnnnnnnnnnnnnnnnnnnnnnnnnnnnnnnnnnnnnnnnnnnnnnnnnnnnnnnnnnnnnnnnnnnnnnnnnnnnnnnnnnnnnnnnnnnnnnnnnnnnnnnnnnnnnnnnnnnnnnnnnnnnnnnnnnnnnnnnnnnnnnnnnnnnnnnnnnnnnnnnnnnnnnnnnnnnnnnnnnnnnnnnnnnnnnnnnnnnnnnnnnnnnnnnnnnnnnnnnnnnnnnnnnnnnnnnnnnnnnnnnnnnnnnnnnnnnnnnnnnnnnnnnnnnnnnnnnnnnnnnnnnnnnnnnnnnnnnnnnnnnnnnnnnnnnnnnnnnnnnnnnnnnnnnnnnnnnnnnnnnnnnnnnnnnnnnnnnnnnnnnnnnnnnnnnnnnnnnnnnnnnnnnnnnnnnnnnnnnnnnnnnnnnnnnnnnnnnnnnnnnnnnnnnnnnnnnnnnnnnnnnnnnnnnnnnnnnnnnnnnnnnnnnnnnnnnnnnnnnnnnnnnnnnnnnnnnnnnnnnnnnnnnnnnnnnnnnnnnnnnnnnnnnnnnnnnnnnnnnnnnnnnnnnnnnnnnnnnnnnnnnnnnnnnnnnnnnnnnnnnnnnnnnnnnnnnnnnnnnnnnnnnnnnnnnnnnnnnnnnnnnnnnnnnnnnnnnnnnnnnnnnnnnnnnnnnnnnnnnnnnnnnnnnnnnnnnnnnnnnnnnnnnnnnnnnnnnnnnnnnnnnnnnnnnnnnnnnnnnnnnnnnnnnnnnnnnnnnnnnnnnnnnnnnnnnnnnnnnnnnnnnnnnnnnnnnnnnnnnnnnnnnnnnnnnnnnnnnnnnnnnnnnnnnnnnnnnnnnnnnnnnnnnnnnnnnnnnnnnnnnnnnnnnnnnnnnnnnnnnnnnnnnnnnnnnnnnnnnnnnnnnnnnnnnnnnnnnnnnnnnnnnnnnnnnnnnnnnnnnnnnnnnnnnnnnnnnnnnnnnnnnnnnnnnnnnnnnnnnnnnnnnnnnnnnnnnnnnnnnnnnnnnnnnnnnnnnnnnnnnnnnnnnnnnnnnnnnnnnnnnnnnnnnnnnnnnnnnnnnnnnnnnnnnnnnnnnnnnnnnnnnnnnnnnnnnnnnnnnnnnnnnnnnnnnnnnnnnnnnnnnnnnnnnnnnnnnnnnnnnnnnnnnnnnnnnnnnnnnnnnnnnnnnnnnnnnnnnnnnnnnnnnnnnnnnnnnnnnnnnnnnnnnnnnnnnnnnnnnnnnnnnnnnnnnnnnnnnnnnnnnnnnnnnnnnnnnnnnnnnnnnnnnnnnnnnnnnnnnnnnnnnnnnnnnnnnnnnnnnnnnnnnnnnnnnnnnnnnnnnnnnnnnnnnnnnnnnnnnnnnnnnnnnnnnnnnnnnnnnnnnnnnnnnnnnnnnnnnnnnnnnnnnnnnnnnnnnnnnnnnnnnnnnnnnnnnnnnnnnnnnnnnnnnnnnnnnnnnnnnnnnnnnnnnnnnnnnnnnnnnnnnnnnnnnnnnnnnnnnnnnnnnnnnnnnnnnnnnnnnnnnnnnnnnnnnnnnnnnnnnnnnnnnnnnnnnnnnnnnnnnnnnnnnnnnnnnnnnnnnnnnnnnnnnnnnnnnnnnnnnnnnnnnnnnnnnnnnnnnnnnnnnnnnnnnnnnnnnnnnnnnnnnnnnnnnnnnnnnnnnnnnnnnnnnnnnnnnnnnnnnnnnnnnnnnnnnnnnnnnnnnnnnnnnnnnnnnnnnnnnnnnnnnnnnnnnnnnnnnnnnnnnnnnnnnnnnnnnnnnnnnnnnnnnnnnnnnnnnnnnnnnnnnnnnnnnnnnnnnnnnnnnnnnnnnnnnnnnnnnnnnnnnnnnnnnnnnnnnnnnnnnnnnnnnnnnnnnnnnnnnnnnnnnnnnnnnnnnnnnnnnnnnnnnnnnnnnnnnnnnnnnnnnnnnnnnnnnnnnnnnnnnnnnnnnnnnnnnnnnnnnnnnnnnnnnnnnnnnnnnnnnnnnnnnnnnnnnnnnnnnnnnnnnnnnnnnnnnnnnnnnnnnnnnnnnnnnnnnnnnnnnnnnnnnnnnnnnnnnnnnnnnnnnnnnnnnnnnnnnnnnnnnnnnnnnnnnnnnnnnnnnnnnnnnnnnnnnnnnnnnnnnnnnnnnnnnnnnnnnnnnnnnnnnnnnnnnnnnnnnnnnnnnnnnnnnnnnnnnnnnnnnnnnnnnnnnnnnnnnnnnnnnnnnnnnnnnnnnnnnnnnnnnnnnnnnnnnnnnnnnnnnnnnnnnnnnnnnnnnnnnnnnnnnnnnnnnnnnnnnnnnnnnnnnnnnnnnnnnnnnnnnnnnnnnnnnnnnnnnnnnnnnnnnnnnnnnnnnnnnnnnnnnnnnnnnnnnnnnnnnnnnnnnnnnnnnnnnnnnnnnnnnnnnnnnnnnnnnnnnnnnnnnnnnnnnnnnnnnnnnnnnnnnnnnnnnnnnnnnnnnnnnnnnnnnnnnnnnnnnnnnnnnnnnnnnnnnnnnnnnnnnnnnnnnnnnnnnnnnnnnnnnnnnnnnnnnnnnnnnnnnnnnnnnnnnnnnnnnnnnnnnnnnnnnnnnnnnnnnnnnnnnnnnnnnnnnnnnnnnnnnnnnnnnnnnnnnnnnnnnnnnnnnnnnnnnnnnnnnnnnnnnnnnnnnnnnnnnnnnnnnnnnnnnnnnnnnnnnnnnnnnnnnnnnnnnnnnnnnnnnnnnnnnnnnnnnnnnnnnnnnnnnnnnnnnnnnnnnnnnnnnnnnnnnnnnnnnnnnnnnnnnnnnnnnnnnnnnnnnnnnnnnnnnnnnnnnnnnnnnnnnnnnnnnnnnnnnnnnnnnnnnnnnnnnnnnnnnnnnnnnnnnnnnnnnnnnnnnnnnnnnnnnnnnnnnnnnnnnnnnnnnnnnnnnnnnnnnnnnnnnnnnnnnnnnnnnnnnnnnnnnnnnnnnnnnnnnnnnnnnnnnnnnnnnnnnnnnnnnnnnnnnnnnnnnnnnnnnnnnnnnnnnnnnnnnnnnnnnnnnnnnnnnnnnnnnnnnnnnnnnnnnnnnnnnnnnnnnnnnnnnnnnnnnnnnnnnnnnnnnnnnnnnnnnnnnnnnnnnnnnnnnnnnnnnnnnnnnnnnnnnnnnnnnnnnnnnnnnnnnnnnnnnnnnnnnnnnnnnnnnnnnnnnnnnnnnnnnnnnnnnnnnnnnnnnnnnnnnnnnnnnnnnnnnnnnnnnnnnnnnnnnnnnnnnnnnnnnnnnnnnnnnnnnnnnnnnnnnnnnnnnnnnnnnnnnnnnnnnnnnnnnnnnnnnnnnnnnnnnnnnnnnnnnnnnnnnnnnnnnnnnnnnnnnnnnnnnnnnnnnnnnnnnnnnnnnnnnnnnnnnnnnnnnnnnnnnnnnnnnnnnnnnnnnnnnnnnnnnnnnnnnnnnnnnnnnnnnnnnnnnnnnnnnnnnnnnnnnnnnnnnnnnnnnnnnnnnnnnnnnnnnnnnnnnnnnnnnnnnnnnnnnnnnnnnnnnnnnnnnnnnnnnnnnnnnnnnnnnnnnnnnnnnnnnnnnnnnnnnnnnnnnnnnnnnnnnnnnnnnnnnnnnnnnnnnnnnnnnnnnnnnnnnnnnnnnnnnnnnnnnnnnnnnnnnnnnnnnnnnnnnnnnnnnnnnnnnnnnnnnnnnnnnnnnnnnnnnnnnnnnnnnnnnnnnnnnnnnnnnnnnnnnnnnnnnnnnnnnnnnnnnnnnnnnnnnnnnnnnnnnnnnnnnnnnnnnnnnnnnnnnnnnnnnnnnnnnnnnnnnnnnnnnnnnnnnnnnnnnnnnnnnnnnnnnnnnnnnnnnnnnnnnnnnnnnnnnnnnnnnnnnnnnnnnnnnnnnnnnnnnnnnnnnnnnnnnnnnnnnnnnnnnnnnnnnnnnnnnnnnnnnnnnnnnnnnnnnnnnnnnnnnnnnnnnnnnnnnnnnnnnnnnnnnnnnnnnnnnnnnnnnnnnnnnnnnnnnnnnnnnnnnnnnnnnnnnnnnnnnnnnnnnnnnnnnnnnnnnnnnnnnnnnnnnnnnnnnnnnnnnnnnnnnnnnnnnnnnnnnnnnnnnnnnnnnnnnnnnnnnnnnnnnnnnnnnnnnnnnnnnnnnnnnnnnnnnnnnnnnnnnnnnnnnnnnnnnnnnnnnnnnnnnnnnnnnnnnnnnnnnnnnnnnnnnnnnnnnnnnnnnnnnnnnnnnnnnnnnnnnnnnnnnnnnnnnnnnnnnnnnnnnnnnnnnnnnnnnnnnnnnnnnnnnnnnnnnnnnnnnnnnnnnnnnnnnnnnnnnnnnnnnnnnnnnnnnnnnnnnnnnnnnnnnnnnnnnnnnnnnnnnnnnnnnnnnnnnnnnnnnnnnnnnnnnnnnnnnnnnnnnnnnnnnnnnnnnnnnnnnnnnnnnnnnnnnnnnnnnnnnnnnnnnnnnnnnnnnnnnnnnnnnnnnnnnnnnnnnnnnnnnnnnnnnnnnnnnnnnnnnnnnnnnnnnnnnnnnnnnnnnnnnnnnnnnnnnnnnnnnnnnnnnnnnnnnnnnnnnnnnnnnnnnnnnnnnnnnnnnnnnnnnnnnnnnnnnnnnnnnnnnnnnnnnnnnnnnnnnnnnnnnnnnnnnnnnnnnnnnnnnnnnnnnnnnnnnnnnnnnnnnnnnnnnnnnnnnnnnnnnnnnnnnnnnnnnnnnnnnnnnnnnnnnnnnnnnnnnnnnnnnnnnnnnnnnnnnnnnnnnnnnnnnnnnnnnnnnnnnnnnnnnnnnnnnnnnnnnnnnnnnnnnnnnnnnnnnnnnnnnnnnnnnnnnnnnnnnnnnnnnnnnnnnnnnnnnnnnnnnnnnnnnnnnnnnnnnnnnnnnnnnnnnnnnnnnnnnnnnnnnnnnnnnnnnnnnnnnnnnnnnnnnnnnnnnnnnnnnnnnnnnnnnnnnnnnnnnnnnnnnnnnnnnnnnnnnnnnnnnnnnnnnnnnnnnnnnnnnnnnnnnnnnnnnnnnnnnnnnnnnnnnnnnnnnnnnnnnnnnnnnnnnnnnnnnnnnnnnnnnnnnnnnnnnnnnnnnnnnnnnnnnnnnnnnnnnnnnnnnnnnnnnnnnnnnnnnnnnnnnnnnnnnnnnnnnnnnnnnnnnnnnnnnnnnnnnnnnnnnnnnnnnnnnnnnnnnnnnnnnnnnnnnnnnnnnnnnnnnnnnnnnnnnnnnnnnnnnnnnnnnnnnnnnnnnnnnnnnnnnnnnnnnnnnnnnnnnnnnnnnnnnnnnnnnnnnnnnnnnnnnnnnnnnnnnnnnnnnnnnnnnnnnnnnnnnnnnnnnnnnnnnnnnnnnnnnnnnnnnnnnnnnnnnnnnnnnnnnnnnnnnnnnnnnnnnnnnnnnnnnnnnnnnnnnnnnnnnnnnnnnnnnnnnnnnnnnnnnnnnnnnnnnnnnnnnnnnnnnnnnnnnnnnnnnnnnnnnnnnnnnnnnnnnnnnnnnnnnnnnnnnnnnnnnnnnnnnnnnnnnnnnnnnnnnnnnnnnnnnnnnnnnnnnnnnnnnnnnnnnnnnnnnnnnnnnnnnnnnnnnnnnnnnnnnnnnnnnnnnnnnnnnnnnnnnnnnnnnnnnnnnnnnnnnnnnnnnnnnnnnnnnnnnnnnnnnnnnnnnnnnnnnnnnnnnnnnnnnnnnnnnnnnnnnnnnnnnnnnnnnnnnnnnnnnnnnnnnnnnnnnnnnnnnnnnnnnnnnnnnnnnnnnnnnnnnnnnnnnnnnnnnnnnnnnnnnnnnnnnnnnnnnnnnnnnnnnnnnnnnnnnnnnnnnnnnnnnnnnnnnnnnnnnnnnnnnnnnnnnnnnnnnnnnnnnnnnnnnnnnnnnnnnnnnnnnnnnnnnnnnnnnnnnnnnnnnnnnnnnnnnnnnnnnnnnnnnnnnnnnnnnnnnnnnnnnnnnnnnnnnnnnnnnnnnnnnnnnnnnnnnnnnnnnnnnnnnnnnnnnnnnnnnnnnnnnnnnnnnnnnnnnnnnnnnnnnnnnnnnnnnnnnnnnnnnnnnnnnnnnnnnnnnnnnnnnnnnnnnnnnnnnnnnnnnnnnnnnnnnnnnnnnnnnnnnnnnnnnnnnnnnnnnnnnnnnnnnnnnnnnnnnnnnnnnnnnnnnnnnnnnnnnnnnnnnnnnnnnnnnnnnnnnnnnnnnnnnnnnnnnnnnnnnnnnnnnnnnnnnnnnnnnnnnnnnnnnnnnnnnnnnnnnnnnnnnnnnnnnnnnnnnnnnnnnnnnnnnnnnnnnnnnnnnnnnnnnnnnnnnnnnnnnnnnnnnnnnnnnnnnnnnnnnnnnnnnnnnnnnnnnnnnnnnnnnnnnnnnnnnnnnnnnnnnnnnnnnnnnnnnnnnnnnnnnnnnnnnnnnnnnnnnnnnnnnnnnnnnnnnnnnnnnnnnnnnnnnnnnnnnnnnnnnnnnnnnnnnnnnnnnnnnnnnnnnnnnnnnnnnnnnnnnnnnnnnnnnnnnnnnnnnnnnnnnnnnnnnnnnnnnnnnnnnnnnnnnnnnnnnnnnnnnnnnnnnnnnnnnnnnnnnnnnnnnnnnnnnnnnnnnnnnnnnnnnnnnnnnnnnnnnnnnnnnnnnnnnnnnnnnnnnnnnnnnnnnnnnnnnnnnnnnnnnnnnnnnnnnnnnnnnnnnnnnnnnnnnnnnnnnnnnnnnnnnnnnnnnnnnnnnnnnnnnnnnnnnnnnnnnnnnnnnnnnnnnnnnnnnnnnnnnnnnnnnnnnnnnnnnnnnnnnnnnnnnnnnnnnnnnnnnnnnnnnnnnnnnnnnnnnnnnnnnnnnnnnnnnnnnnnnnnnnnnnnnnnnnnnnnnnnnnnnnnnnnnnnnnnnnnnnnnnnnnnnnnnnnnnnnnnnnnnnnnnnnnnnnnnnnnnnnnnnnnnnnnnnnnnnnnnnnnnnnnnnnnnnnnnnnnnnnnnnnnnnnnnnnnnnnnnnnnnnnnnnnnnnnnnnnnnnnnnnnnnnnnnnnnnnnnnnnnnnnnnnnnnnnnnnnnnnnnnnnnnnnnnnnnnnnnnnnnnnnnnnnnnnnnnnnnnnnnnnnnnnnnnnnnnnnnnnnnnnnnnnnnnnnnnnnnnnnnnnnnnnnnnnnnnnnnnnnnnnnnnnnnnnnnnnnnnnnnnnnnnnnnnnnnnnnnnnnnnnnnnnnnnnnnnnnnnnnnnnnnnnnnnnnnnnnnnnnnnnnnnnnnnnnnnnnnnnnnnnnnnnnnnnnnnnnnnnnnnnnnnnnnnnnnnnnnnnnnnnnnnnnnnnnnnnnnnnnnnnnnnnnnnnnnnnnnnnnnnnnnnnnnnnnnnnnnnnnnnnnnnnnnnnnnnnnnnnnnnnnnnnnnnnnnnnnnnnnnnnnnnnnnnnnnnnnnnnnnnnnnnnnnnnnnnnnnnnnnnnnnnnnnnnnnnnnnnnnnnnnnnnnnnnnnnnnnnnnnnnnnnnnnnnnnnnnnnnnnnnnnnnnnnnnnnnnnnnnnnnnnnnnnnnnnnnnnnnnnnnnnnnnnnnnnnnnnnnnnnnnnnnnnnnnnnnnnnnnnnnnnnnnnnnnnnnnnnnnnnnnnnnnnnnnnnnnnnnnnnnnnnnnnnnnnnnnnnnnnnnnnnnnnnnnnnnnnnnnnnnnnnnnnnnnnnnnnnnnnnnnnnnnnnnnnnnnnnnnnnnnnnnnnnnnnnnnnnnnnnnnnnnnnnnnnnnnnnnnnnnnnnnnnnnnnnnnnnnnnnnnnnnnnnnnnnnnnnnnnnnnnnnnnnnnnnnnnnnnnnnnnnnnnnnnnnnnnnnnnnnnnnnnnnnnnnnnnnnnnnnnnnnnnnnnnnnnnnnnnnnnnnnnnnnnnnnnnnnnnnnnnnnnnnnnnnnnnnnnnnnnnnnnnnnnnnnnnnnnnnnnnnnnnnnnnnnnnnnnnnnnnnnnnnnnnnnnnnnnnnnnnnnnnnnnnnnnnnnnnnnnnnnnnnnnnnnnnnnnnnnnnnnnnnnnnnnnnnnnnnnnnnnnnnnnnnnnnnnnnnnnnnnnnnnnnnnnnnnnnnnnnnnnnnnnnnnnnnnnnnnnnnnnnnnnnnnnnnnnnnnnnnnnnnnnnnnnnnnnnnnnnnnnnnnnnnnnnnnnnnnnnnnnnnnnnnnnnnnnnnnnnnnnnnnnnnnnnnnnnnnnnnnnnnnnnnnnnnnnnnnnnnnnnnnnnnnnnnnnnnnnnnnnnnnnnnnnnnnnnnnnnnnnnnnnnnnnnnnnnnnnnnnnnnnnnnnnnnnnnnnnnnnnnnnnnnnnnnnnnnnnnnnnnnnnnnnnnnnnnnnnnnnnnnnnnnnnnnnnnnnnnnnnnnnnnnnnnnnnnnnnnnnnnnnnnnnnnnnnnnnnnnnnnnnnnnnnnnnnnnnnnnnnnnnnnnnnnnnnnnnnnnnnnnnnnnnnnnnnnnnnnnnnnnnnnnnnnnnnnnnnnnnnnnnnnnnnnnnnnnnnnnnnnnnnnnnnnnnnnnnnnnnnnnnnnnnnnnnnnnnnnnnnnnnnnnnnnnnnnnnnnnnnnnnnnnnnnnnnnnnnnnnnnnnnnnnnnnnnnnnnnnnnnnnnnnnnnnnnnnnnnnnnnnnnnnnnnnnnnnnnnnnnnnnnnnnnnnnnnnnnnnnnnnnnnnnnnnnnnnnnnnnnnnnnnnnnnnnnnnnnnnnnnnnnnnnnnnnnnnnnnnnnnnnnnnnnnnnnnnnnnnnnnnnnnnnnnnnnnnnnnnnnnnnnnnnnnnnnnnnnnnnnnnnnnnnnnnnnnnnnnnnnnnnnnnnnnnnnnnnnnnnnnnnnnnnnnnnnnnnnnnnnnnnnnnnnnnnnnnnnnnnnnnnnnnnnnnnnnnnnnnnnnnnnnnnnnnnnnnnnnnnnnnnnnnnnnnnnnnnnnnnnnnnnnnnnnnnnnnnnnnnnnnnnnnnnnnnnnnnnnnnnnnnnnnnnnnnnnnnnnnnnnnnnnnnnnnnnnnnnnnnnnnnnnnnnnnnnnnnnnnnnnnnnnnnnnnnnnnnnnnnnnnnnnnnnnnnnnnnnnnnnnnnnnnnnnnnnnnnnnnnnnnnnnnnnnnnnnnnnnnnnnnnnnnnnnnnnnnnnnnnnnnnnnnnnnnnnnnnnnnnnnnnnnnnnnnnnnnnnnnnnnnnnnnnnnnnnnnnnnnnnnnnnnnnnnnnnnnnnnnnnnnnnnnnnnnnnnnnnnnnnnnnnnnnnnnnnnnnnnnnnnnnnnnnnnnnnnnnnnnnnnnnnnnnnnnnnnnnnnnnnnnnnnnnnnnnnnnnnnnnnnnnnnnnnnnnnnnnnnnnnnnnnnnnnnnnnnnnnnnnnnnnnnnnnnnnnnnnnnnnnnnnnnnnnnnnnnnnnnnnnnnnnnnnnnnnnnnnnnnnnnnnnnnnnnnnnnnnnnnnnnnnnnnnnnnnnnnnnnnnnnnnnnnnnnnnnnnnnnnnnnnnnnnnnnnnnnnnnnnnnnnnnnnnnnnnnnnnnnnnnnnnnnnnnnnnnnnnnnnnnnnnnnnnnnnnnnnnnnnnnnnnnnnnnnnnnnnnnnnnnnnnnnnnnnnnnnnnnnnnnnnnnnnnnnnnnnnnnnnnnnnnnnnnnnnnnnnnnnnnnnnnnnnnnnnnnnnnnnnnnnnnnnnnnnnnnnnnnnnnnnnnnnnnnnnnnnnnnnnnnnnnnnnnnnnnnnnnnnnnnnnnnnnnnnnnnnnnnnnnnnnnnnnnnnnnnnnnnnnnnnnnnnnnnnnnnnnnnnnnnnnnnnnnnnnnnnnnnnnnnnnnnnnnnnnnnnnnnnnnnnnnnnnnnnnnnnnnnnnnnnnnnnnnnnnnnnnnnnnnnnnnnnnnnnnnnnnnnnnnnnnnnnnnnnnnnnnnnnnnnnnnnnnnnnnnnnnnnnnnnnnnnnnnnnnnnnnnnnnnnnnnnnnnnnnnnnnnnnnnnnnnnnnnnnnnnnnnnnnnnnnnnnnnnnnnnnnnnnnnnnnnnnnnnnnnnnnnnnnnnnnnnnnnnnnnnnnnnnnnnnnnnnnnnnnnnnnnnnnnnnnnnnnnnnnnnnnnnnnnnnnnnnnnnnnnnnnnnnnnnnnnnnnnnnnnnnnnnnnnnnnnnnnnnnnnnnnnnnnnnnnnnnnnnnnnnnnnnnnnnnnnnnnnnnnnnnnnnnnnnnnnnnnnnnnnnnnnnnnnnnnnnnnnnnnnnnnnnnnnnnnnnnnnnnnnnnnnnnnnnnnnnnnnnnnnnnnnnnnnnnnnnnnnnnnnnnnnnnnnnnnnnnnnnnnnnnnnnnnnnnnnnnnnnnnnnnnnnnnnnnnnnnnnnnnnnnnnnnnnnnnnnnnnnnnnnnnnnnnnnnnnnnnnnnnnnnnnnnnnnnnnnnnnnnnnnnnnnnnnnnnnnnnnnnnnnnnnnnnnnnnnnnnnnnnnnnnnnnnnnnnnnnnnnnnnnnnnnnnnnnnnnnnnnnnnnnnnnnnnnnnnnnnnnnnnnnnnnnnnnnnnnnnnnnnnnnnnnnnnnnnnnnnnnnnnnnnnnnnnnnnnnnnnnnnnnnnnnnnnnnnnnnnnnnnnnnnnnnnnnnnnnnnnnnnnnnnnnnnnnnnnnnnnnnnnnnnnnnnnnnnnnnnnnnnnnnnnnnnnnnnnnnnnnnnnnnnnnnnnnnnnnnnnnnnnnnnnnnnnnnnnnnnnnnnnnnnnnnnnnnnnnnnnnnnnnnnnnnnnnnnnnnnnnnnnnnnnnnnnnnnnnnnnnnnnnnnnnnnnnnnnnnnnnnnnnnnnnnnnnnnnnnnnnnnnnnnnnnnnnnnnnnnnnnnnnnnnnnnnnnnnnnnnnnnnnnnnnnnnnnnnnnnnnnnnnnnnnnnnnnnnnnnnnnnnnnnnnnnnnnnnnnnnnnnnnnnnnnnnnnnnnnnnnnnnnnnnnnnnnnnnnnnnnnnnnnnnnnnnnnnnnnnnnnnnnnnnnnnnnnnnnnnnnnnnnnnnnnnnnnnnnnnnnnnnnnnnnnnnnnnnnnnnnnnnnnnnnnnnnnnnnnnnnnnnnnnnnnnnnnnnnnnnnnnnnnnnnnnnnnnnnnnnnnnnnnnnnnnnnnnnnnnnnnnnnnnnnnnnnnnnnnnnnnnnnnnnnnnnnnnnnnnnnnnnnnnnnnnnnnnnnnnnnnnnnnnnnnnnnnnnnnnnnnnnnnnnnnnnnnnnnnnnnnnnnnnnnnnnnnnnnnnnnnnnnnnnnnnnnnnnnnnnnnnnnnnnnnnnnnnnnnnnnnnnnnnnnnnnnnnnnnnnnnnnnnnnnnnnnnnnnnnnnnnnnnnnnnnnnnnnnnnnnnnnnnnnnnnnnnnnnnnnnnnnnnnnnnnnnnnnnnnnnnnnnnnnnnnnnnnnnnnnnnnnnnnnnnnnnnnnnnnnnnnnnnnnnnnnnnnnnnnnnnnnnnnnnnnnnnnnnnnnnnnnnnnnnnnnnnnnnnnnnnnnnnnnnnnnnnnnnnnnnnnnnnnnnnnnnnnnnnnnnnnnnnnnnnnnnnnnnnnnnnnnnnnnnnnnnnnnnnnnnnnnnnnnnnnnnnnnnnnnnnnnnnnnnnnnnnnnnnnnnnnnnnnnnnnnnnnnnnnnnnnnnnnnnnnnnnnnnnnnnnnnnnnnnnnnnnnnnnnnnnnnnnnnnnnnnnnnnnnnnnnnnnnnnnnnnnnnnnnnnnnnnnnnnnnnnnnnnnnnnnnnnnnnnnnnnnnnnnnnnnnnnnnnnnnnnnnnnnnnnnnnnnnnnnnnnnnnnnnnnnnnnnnnnnnnnnnnnnnnnnnnnnnnnnnnnnnnnnnnnnnnnnnnnnnnnnnnnnnnnnnnnnnnnnnnnnnnnnnnnnnnnnnnnnnnnnnnnnnnnnnnnnnnnnnnnnnnnnnnnnnnnnnnnnnnnnnnnnnnnnnnnnnnnnnnnnnnnnnnnnnnnnnnnnnnnnnnnnnnnnnnnnnnnnnnnnnnnnnnnnnnnnnnnnnnnnnnnnnnnnnnnnnnnnnnnnnnnnnnnnnnnnnnnnnnnnnnnnnnnnnnnnnnnnnnnnnnnnnnnnnnnnnnnnnnnnnnnnnnnnnnnnnnnnnnnnnnnnnnnnnnnnnnnnnnnnnnnnnnnnnnnnnnnnnnnnnnnnnnnnnnnnnnnnnnnnnnnnnnnnnnnnnnnnnnnnnnnnnnnnnnnnnnnnnnnnnnnnnnnnnnnnnnnnnnnnnnnnnnnnnnnnnnnnnnnnnnnnnnnnnnnnnnnnnnnnnnnnnnnnnnnnnnnnnnnnnnnnnnnnnnnnnnnnnnnnnnnnnnnnnnnnnnnnnnnnnnnnnnnnnnnnnnnnnnnnnnnnnnnnnnnnnnnnnnnnnnnnnnnnnnnnnnnnnnnnnnnnnnnnnnnnnnnnnnnnnnnnnnnnnnnnnnnnnnnnnnnnnnnnnnnnnnnnnnnnnnnnnnnnnnnnnnnnnnnnnnnnnnnnnnnnnnnnnnnnnnnnnnnnnnnnnnnnnnnnnnnnnnnnnnnnnnnnnnnnnnnnnnnnnnnnnnnnnnnnnnnnnnnnnnnnnnnnnnnnnnnnnnnnnnnnnnnnnnnnnnnnnnnnnnnnnnnnnnnnnnnnnnnnnnnnnnnnnnnnnnnnnnnnnnnnnnnnnnnnnnnnnnnnnnnnnnnnnnnnnnnnnnnnnnnnnnnnnnnnnnnnnnnnnnnnnnnnnnnnnnnnnnnnnnnnnnnnnnnnnnnnnnnnnnnnnnnnnnnnnnnnnnnnnnnnnnnnnnnnnnnnnnnnnnnnnnnnnnnnnnnnnnnnnnnnnnnnnnnnnnnnnnnnnnnnnnnnnnnnnnnnnnnnnnnnnnnnnnnnnnnnnnnnnnnnnnnnnnnnnnnnnnnnnnnnnnnnnnnnnnnnnnnnnnnnnnnnnnnnnnnnnnnnnnnnnnnnnnnnnnnnnnnnnnnnnnnnnnnnnnnnnnnnnnnnnnnnnnnnnnnnnnnnnnnnnnnnnnnnnnnnnnnnnnnnnnnnnnnnnnnnnnnnnnnnnnnnnnnnnnnnnnnnnnnnnnnnnnnnnnnnnnnnnnnnnnnnnnnnnnnnnnnnnnnnnnnnnnnnnnnnnnnnnnnnnnnnnnnnnnnnnnnnnnnnnnnnnnnnnnnnnnnnnnnnnnnnnnnnnnnnnnnnnnnnnnnnnnnnnnnnnnnnnnnnnnnnnnnnnnnnnnnnnnnnnnnnnnnnnnnnnnnnnnnnnnnnnnnnnnnnnnnnnnnnnnnnnnnnnnnnnnnnnnnnnnnnnnnnnnnnnnnnnnnnnnnnnnnnnnnnnnnnnnnnnnnnnnnnnnnnnnnnnnnnnnnnnnnnnnnnnnnnnnnnnnnnnnnnnnnnnnnnnnnnnnnnnnnnnnnnnnnnnnnnnnnnnnnnnnnnnnnnnnnnnnnnnnnnnnnnnnnnnnnnnnnnnnnnnnnnnnnnnnnnnnnnnnnnnnnnnnnnnnnnnnnnnnnnnnnnnnnnnnnnnnnnnnnnnnnnnnnnnnnnnnnnnnnnnnnnnnnnnnnnnnnnnnnnnnnnnnnnnnnnnnnnnnnnnnnnnnnnnnnnnnnnnnnnnnnnnnnnnnnnnnnnnnnnnnnnnnnnnnnnnnnnnnnnnnnnnnnnnnnnnnnnnnnnnnnnnnnnnnnnnnnnnnnnnnnnnnnnnnnnnnnnnnnnnnnnnnnnnnnnnnnnnnnnnnnnnnnnnnnnnnnnnnnnnnnnnnnnnnnnnnnnnnnnnnnnnnnnnnnnnnnnnnnnnnnnnnnnnnnnnnnnnnnnnnnnnnnnnnnnnnnnnnnnnnnnnnnnnnnnnnnnnnnnnnnnnnnnnnnnnnnnnnnnnnnnnnnnnnnnnnnnnnnnnnnnnnnnnnnnnnnnnnnnnnnnnnnnnnnnnnnnnnnnnnnnnnnnnnnnnnnnnnnnnnnnnnnnnnnnnnnnnnnnnnnnnnnnnnnnnnnnnnnnnnnnnnnnnnnnnnnnnnnnnnnnnnnnnnnnnnnnnnnnnnnnnnnnnnnnnnnnnnnnnnnnnnnnnnnnnnnnnnnnnnnnnnnnnnnnnnnnnnnnnnnnnnnnnnnnnnnnnnnnnnnnnnnnnnnnnnnnnnnnnnnnnnnnnnnnnnnnnnnnnnnnnnnnnnnnnnnnnnnnnnnnnnnnnnnnnnnnnnnnnnnnnnnnnnnnnnnnnnnnnnnnnnnnnnnnnnnnnnnnnnnnnnnnnnnnnnnnnnnnnnnnnnnnnnnnnnnnnnnnnnnnnnnnnnnnnnnnnnnnnnnnnnnnnnnnnnnnnnnnnnnnnnnnnnnnnnnnnnnnnnnnnnnnnnnnnnnnnnnnnnnnnnnnnnnnnnnnnnnnnnnnnnnnnnnnnnnnnnnnnnnnnnnnnnnnnnnnnnnnnnnnnnnnnnnnnnnnnnnnnnnnnnnnnnnnnnnnnnnnnnnnnnnnnnnnnnnnnnnnnnnnnnnnnnnnnnnnnnnnnnnnnnnnnnnnnnnnnnnnnnnnnnnnnnnnnnnnnnnnnnnnnnnnnnnnnnnnnnnnnnnnnnnnnnnnnnnnnnnnnnnnnnnnnnnnnnnnnnnnnnnnnnnnnnnnnnnnnnnnnnnnnnnnnnnnnnnnnnnnnnnnnnnnnnnnnnnnnnnnnnnnnnnnnnnnnnnnnnnnnnnnnnnnnnnnnnnnnnnnnnnnnnnnnnnnnnnnnnnnnnnnnnnnnnnnnnnnnnnnnnnnnnnnnnnnnnnnnnnnnnnnnnnnnnnnnnnnnnnnnnnnnnnnnnnnnnnnnnnnnnnnnnnnnnnnnnnnnnnnnnnnnnnnnnnnnnnnnnnnnnnnnnnnnnnnnnnnnnnnnnnnnnnnnnnnnnnnnnnnnnnnnnnnnnnnnnnnnnnnnnnnnnnnnnnnnnnnnnnnnnnnnnnnnnnnnnnnnnnnnnnnnnnnnnnnnnnnnnnnnnnnnnnnnnnnnnnnnnnnnnnnnnnnnnnnnnnnnnnnnnnnnnnnnnnnnnnnnnnnnnnnnnnnnnnnnnnnnnnnnnnnnnnnnnnnnnnnnnnnnnnnnnnnnnnnnnnnnnnnnnnnnnnnnnnnnnnnnnnnnnnnnnnnnnnnnnnnnnnnnnnnnnnnnnnnnnnnnnnnnnnnnnnnnnnnnnnnnnnnnnnnnnnnnnnnnnnnnnnnnnnnnnnnnnnnnnnnnnnnnnnnnnnnnnnnnnnnnnnnnnnnnnnnnnnnnnnnnnnnnnnnnnnnnnnnnnnnnnnnnnnnnnnnnnnnnnnnnnnnnnnnnnnnnnnnnnnnnnnnnnnnnnnnnnnnnnnnnnnnnnnnnnnnnnnnnnnnnnnnnnnnnnnnnnnnnnnnnnnnnnnnnnnnnnnnnnnnnnnnnnnnnnnnnnnnnnnnnnnnnnnnnnnnnnnnnnnnnnnnnnnnnnnnnnnnnnnnnnnnnnnnnnnnnnnnnnnnnnnnnnnnnnnnnnnnnnnnnnnnnnnnnnnnnnnnnnnnnnnnnnnnnnnnnnnnnnnnnnnnnnnnnnnnnnnnnnnnnnnnnnnnnnnnnnnnnnnnnnnnnnnnnnnnnnnnnnnnnnnnnnnnnnnnnnnnnnnnnnnnnnnnnnnnnnnnnnnnnnnnnnnnnnnnnnnnnnnnnnnnnnnnnnnnnnnnnnnnnnnnnnnnnnnnnnnnnnnnnnnnnnnnnnnnnnnnnnnnnnnnnnnnnnnnnnnnnnnnnnnnnnnnnnnnnnnnnnnnnnnnnnnnnnnnnnnnnnnnnnnnnnnnnnnnnnnnnnnnnnnnnnnnnnnnnnnnnnnnnnnnnnnnnnnnnnnnnnnnnnnnnnnnnnnnnnnnnnnnnnnnnnnnnnnnnnnnnnnnnnnnnnnnnnnnnnnnnnnnnnnnnnnnnnnnnnnnnnnnnnnnnnnnnnnnnnnnnnnnnnnnnnnnnnnnnnnnnnnnnnnnnnnnnnnnnnnnnnnnnnnnnnnnnnnnnnnnnnnnnnnnnnnnnnnnnnnnnnnnnnnnnnnnnnnnnnnnnnnnnnnnnnnnnnnnnnnnnnnnnnnnnnnnnnnnnnnnnnnnnnnnnnnnnnnnnnnnnnnnnnnnnnnnnnnnnnnnnnnnnnnnnnnnnnnnnnnnnnnnnnnnnnnnnnnnnnnnnnnnnnnnnnnnnnnnnnnnnnnnnnnnnnnnnnnnnnnnnnnnnnnnnnnnnnnnnnnnnnnnnnnnnnnnnnnnnnnnnnnnnnnnnnnnnnnnnnnnnnnnnnnnnnnnnnnnnnnnnnnnnnnnnnnnnnnnnnnnnnnnnnnnnnnnnnnnnnnnnnnnnnnnnnnnnnnnnnnnnnnnnnnnnnnnnnnnnnnnnnnnnnnnnnnnnnnnnnnnnnnnnnnnnnnnnnnnnnnnnnnnnnnnnnnnnnnnnnnnnnnnnnnnnnnnnnnnnnnnnnnnnnnnnnnnnnnnnnnnnnnnnnnnnnnnnnnnnnnnnnnnnnnnnnnnnnnnnnnnnnnnnnnnnnnnnnnnnnnnnnnnnnnnnnnnnnnnnnnnnnnnnnnnnnnnnnnnnnnnnnnnnnnnnnnnnnnnnnnnnnnnnnnnnnnnnnnnnnnnnnnnnnnnnnnnnnnnnnnnnnnnnnnnnnnnnnnnnnnnnnnnnnnnnnnnnnnnnnnnnnnnnnnnnnnnnnnnnnnnnnnnnnnnnnnnnnnnnnnnnnnnnnnnnnnnnnnnnnnnnnnnnnnnnnnnnnnnnnnnnnnnnnnnnnnnnnnnnnnnnnnnnnnnnnnnnnnnnnnnnnnnnnnnnnnnnnnnnnnnnnnnnnnnnnnnnnnnnnnnnnnnnnnnnnnnnnnnnnnnnnnnnnnnnnnnnnnnnnnnnnnnnnnnnnnnnnnnnnnnnnnnnnnnnnnnnnnnnnnnnnnnnnnnnnnnnnnnnnnnnnnnnnnnnnnnnnnnnnnnnnnnnnnnnnnnnnnnnnnnnnnnnnnnnnnnnnnnnnnnnnnnnnnnnnnnnnnnnnnnnnnnnnnnnnnnnnnnnnnnnnnnnnnnnnnnnnnnnnnnnnnnnnnnnnnnnnnnnnnnnnnnnnnnnnnnnnnnnnnnnnnnnnnnnnnnnnnnnnnnnnnnnnnnnnnnnnnnnnnnnnnnnnnnnnnnnnnnnnnnnnnnnnnnnnnnnnnnnnnnnnnnnnnnnnnnnnnnnnnnnnnnnnnnnnnnnnnnnnnnnnnnnnnnnnnnnnnnnnnnnnnnnnnnnnnnnnnnnnnnnnnnnnnnnnnnnnnnnnnnnnnnnnnnnnnnnnnnnnnnnnnnnnnnnnnnnnnnnnnnnnnnnnnnnnnnnnnnnnnnnnnnnnnnnnnnnnnnnnnnnnnnnnnnnnnnnnnnnnnnnnnnnnnnnnnnnnnnnnnnnnnnnnnnnnnnnnnnnnnnnnnnnnnnnnnnnnnnnnnnnnnnnnnnnnnnnnnnnnnnnnnnnnnnnnnnnnnnnnnnnnnnnnnnnnnnnnnnnnnnnnnnnnnnnnnnnnnnnnnnnnnnnnnnnnnnnnnnnnnnnnnnnnnnnnnnnnnnnnnnnnnnnnnnnnnnnnnnnnnnnnnnnnnnnnnnnnnnnnnnnnnnnnnnnnnnnnnnnnnnnnnnnnnnnnnnnnnnnnnnnnnnnnnnnnnnnnnnnnnnnnnnnnnnnnnnnnnnnnnnnnnnnnnnnnnnnnnnnnnnnnnnnnnnnnnnnnnnnnnnnnnnnnnnnnnnnnnnnnnnnnnnnnnnnnnnnnnnnnnnnnnnnnnnnnnnnnnnnnnnnnnnnnnnnnnnnnnnnnnnnnnnnnnnnnnnnnnnnnnnnnnnnnnnnnnnnnnnnnnnnnnnnnnnnnnnnnnnnnnnnnnnnnnnnnnnnnnnnnnnnnnnnnnnnnnnnnnnnnnnnnnnnnnnnnnnnnnnnnnnnnnnnnnnnnnnnnnnnnnnnnnnnnnnnnnnnnnnnnnnnnnnnnnnnnnnnnnnnnnnnnnnnnnnnnnnnnnnnnnnnnnnnnnnnnnnnnnnnnnnnnnnnnnnnnnnnnnnnnnnnnnnnnnnnnnnnnnnnnnnnnnnnnnnnnnnnnnnnnnnnnnnnnnnnnnnnnnnnnnnnnnnnnnnnnnnnnnnnnnnnnnnnnnnnnnnnnnnnnnnnnnnnnnnnnnnnnnnnnnnnnnnnnnnnnnnnnnnnnnnnnnnnnnnnnnnnnnnnnnnnnnnnnnnnnnnnnnnnnnnnnnnnnnnnnnnnnnnnnnnnnnnnnnnnnnnnnnnnnnnnnnnnnnnnnnnnnnnnnnnnnnnnnnnnnnnnnnnnnnnnnnnnnnnnnnnnnnnnnnnnnnnnnnnnnnnnnnnnnnnnnnnnnnnnnnnnnnnnnnnnnnnnnnnnnnnnnnnnnnnnnnnnnnnnnnnnnnnnnnnnnnnnnnnnnnnnnnnnnnnnnnnnnnnnnnnnnnnnnnnnnnnnnnnnnnnnnnnnnnnnnnnnnnnnnnnnnnnnnnnnnnnnnnnnnnnnnnnnnnnnnnnnnnnnnnnnnnnnnnnnnnnnnnnnnnnnnnnnnnnnnnnnnnnnnnnnnnnnnnnnnnnnnnnnnnnnnnnnnnnnnnnnnnnnnnnnnnnnnnnnnnnnnnnnnnnnnnnnnnnnnnnnnnnnnnnnnnnnnnnnnnnnnnnnnnnnnnnnnnnnnnnnnnnnnnnnnnnnnnnnnnnnnnnnnnnnnnnnnnnnnnnnnnnnnnnnnnnnnnnnnnnnnnnnnnnnnnnnnnnnnnnnnnnnnnnnnnnnnnnnnnnnnnnnnnnnnnnnnnnnnnnnnnnnnnnnnnnnnnnnnnnnnnnnnnnnnnnnnnnnnnnnnnnnnnnnnnnnnnnnnnnnnnnnnnnnnnnnnnnnnnnnnnnnnnnnnnnnnnnnnnnnnnnnnnnnnnnnnnnnnnnnnnnnnnnnnnnnnnnnnnnnnnnnnnnnnnnnnnnnnnnnnnnnnnnnnnnnnnnnnnnnnnnnnnnnnnnnnnnnnnnnnnnnnnnnnnnnnnnnnnnnnnnnnnnnnnnnnnnnnnnnnnnnnnnnnnnnnnnnnnnnnnnnnnnnnnnnnnnnnnnnnnnnnnnnnnnnnnnnnnnnnnnnnnnnnnnnnnnnnnnnnnnnnnnnnnnnnnnnnnnnnnnnnnnnnnnnnnnnnnnnnnnnnnnnnnnnnnnnnnnnnnnnnnnnnnnnnnnnnnnnnnnnnnnnnnnnnnnnnnnnnnnnnnnnnnnnnnnnnnnnnnnnnnnnnnnnnnnnnnnnnnnnnnnnnnnnnnnnnnnnnnnnnnnnnnnnnnnnnnnnnnnnnnnnnnnnnnnnnnnnnnnnnnnnnnnnnnnnnnnnnnnnnnnnnnnnnnnnnnnnnnnnnnnnnnnnnnnnnnnnnnnnnnnnnnnnnnnnnnnnnnnnnnnnnnnnnnnnnnnnnnnnnnnnnnnnnnnnnnnnnnnnnnnnnnnnnnnnnnnnnnnnnnnnnnnnnnnnnnnnnnnnnnnnnnnnnnnnnnnnnnnnnnnnnnnnnnnnnnnnnnnnnnnnnnnnnnnnnnnnnnnnnnnnnnnnnnnnnnnnnnnnnnnnnnnnnnnnnnnnnnnnnnnnnnnnnnnnnnnnnnnnnnnnnnnnnnnnnnnnnnnnnnnnnnnnnnnnnnnnnnnnnnnnnnnnnnnnnnnnnnnnnnnnnnnnnnnnnnnnnnnnnnnnnnnnnnnnnnnnnnnnnnnnnnnnnnnnnnnnnnnnnnnnnnnnnnnnnnnnnnnnnnnnnnnnnnnnnnnnnnnnnnnnnnnnnnnnnnnnnnnnnnnnnnnnnnnnnnnnnnnnnnnnnnnnnnnnnnnnnnnnnnnnnnnnnnnnnnnnnnnnnnnnnnnnnnnnnnnnnnnnnnnnnnnnnnnnnnnnnnnnnnnnnnnnnnnnnnnnnnnnnnnnnnnnnnnnnnnnnnnnnnnnnnnnnnnnnnnnnnnnnnnnnnnnnnnnnnnnnnnnnnnnnnnnnnnnnnnnnnnnnnnnnnnnnnnnnnnnnnnnnnnnnnnnnnnnnnnnnnnnnnnnnnnnnnnnnnnnnnnnnnnnnnnnnnnnnnnnnnnnnnnnnnnnnnnnnnnnnnnnnnnnnnnnnnnnnnnnnnnnnnnnnnnnnnnnnnnnnnnnnnnnnnnnnnnnnnnnnnnnnnnnnnnnnnnnnnnnnnnnnnnnnnnnnnnnnnnnnnnnnnnnnnnnnnnnnnnnnnnnnnnnnnnnnnnnnnnnnnnnnnnnnnnnnnnnnnnnnnnnnnnnnnnnnnnnnnnnnnnnnnnnnnnnnnnnnnnnnnnnnnnnnnnnnnnnnnnnnnnnnnnnnnnnnnnnnnnnnnnnnnnnnnnnnnnnnnnnnnnnnnnnnnnnnnnnnnnnnnnnnnnnnnnnnnnnnnnnnnnnnnnnnnnnnnnnnnnnnnnnnnnnnnnnnnnnnnnnnnnnnnnnnnnnnnnnnnnnnnnnnnnnnnnnnnnnnnnnnnnnnnnnnnnnnnnnnnnnnnnnnnnnnnnnnnnnnnnnnnnnnnnnnnnnnnnnnnnnnnnnnnnnnnnnnnnnnnnnnnnnnnnnnnnnnnnnnnnnnnnnnnnnnnnnnnnnnnnnnnnnnnnnnnnnnnnnnnnnnnnnnnnnnnnnnnnnnnnnnnnnnnnnnnnnnnnnnnnnnnnnnnnnnnnnnnnnnnnnnnnnnnnnnnnnnnnnnnnnnnnnnnnnnnnnnnnnnnnnnnnnnnnnnnnnnnnnnnnnnnnnnnnnnnnnnnnnnnnnnnnnnnnnnnnnnnnnnnnnnnnnnnnnnnnnnnnnnnnnnnnnnnnnnnnnnnnnnnnnnnnnnnnnnnnnnnnnnnnnnnnnnnnnnnnnnnnnnnnnnnnnnnnnnnnnnnnnnnnnnnnnnnnnnnnnnnnnnnnnnnnnnnnnnnnnnnnnnnnnnnnnnnnnnnnnnnnnnnnnnnnnnnnnnnnnnnnnnnnnnnnnnnnnnnnnnnnnnnnnnnnnnnnnnnnnnnnnnnnnnnnnnnnnnnnnnnnnnnnnnnnnnnnnnnnnnnnnnnnnnnnnnnnnnnnnnnnnnnnnnnnnnnnnnnnnnnnnnnnnnnnnnnnnnnnnnnnnnnnnnnnnnnnnnnnnnnnnnnnnnnnnnnnnnnnnnnnnnnnnnnnnnnnnnnnnnnnnnnnnnnnnnnnnnnnnnnnnnnnnnnnnnnnnnnnnnnnnnnnnnnnnnnnnnnnnnnnnnnnnnnnnnnnnnnnnnnnnnnnnnnnnnnnnnnnnnnnnnnnnnnnnnnnnnnnnnnnnnnnnnnnnnnnnnnnnnnnnnnnnnnnnnnnnnnnnnnnnnnnnnnnnnnnnnnnnnnnnnnnnnnnnnnnnnnnnnnnnnnnnnnnnnnnnnnnnnnnnnnnnnnnnnnnnnnnnnnnnnnnnnnnnnnnnnnnnnnnnnnnnnnnnnnnnnnnnnnnnnnnnnnnnnnnnnnnnnnnnnnnnnnnnnnnnnnnnnnnnnnnnnnnnnnnnnnnnnnnnnnnnnnnnnnnnnnnnnnnnnnnnnnnnnnnnnnnnnnnnnnnnnnnnnnnnnnnnnnnnnnnnnnnnnnnnnnnnnnnnnnnnnnnnnnnnnnnnnnnnnnnnnnnnnnnnnnnnnnnnnnnnnnnnnnnnnnnnnnnnnnnnnnnnnnnnnnnnnnnnnnnnnnnnnnnnnnnnnnnnnnnnnnnnnnnnnnnnnnnnnnnnnnnnnnnnnnnnnnnnnnnnnnnnnnnnnnnnnnnnnnnnnnnnnnnnnnnnnnnnnnnnnnnnnnnnnnnnnnnnnnnnnnnnnnnnnnnnnnnnnnnnnnnnnnnnnnnnnnnnnnnnnnnnnnnnnnnnnnnnnnnnnnnnnnnnnnnnnnnnnnnnnnnnnnnnnnnnnnnnnnnnnnnnnnnnnnnnnnnnnnnnnnnnnnnnnnnnnnnnnnnnnnnnnnnnnnnnnnnnnnnnnnnnnnnnnnnnnnnnnnnnnnnnnnnnnnnnnnnnnnnnnnnnnnnnnnnnnnnnnnnnnnnnnnnnnnnnnnnnnnnnnnnnnnnnnnnnnnnnnnnnnnnnnnnnnnnnnnnnnnnnnnnnnnnnnnnnnnnnnnnnnnnnnnnnnnnnnnnnnnnnnnnnnnnnnnnnnnnnnnnnnnnnnnnnnnnnnnnnnnnnnnnnnnnnnnnnnnnnnnnnnnnnnnnnnnnnnnnnnnnnnnnnnnnnnnnnnnnnnnnnnnnnnnnnnnnnnnnnnnnnnnnnnnnnnnnnnnnnnnnnnnnnnnnnnnnnnnnnnnnnnnnnnnnnnnnnnnnnnnnnnnnnnnnnnnnnnnnnnnnnnnnnnnnnnnnnnnnnnnnnnnnnnnnnnnnnnnnnnnnnnnnnnnnnnnnnnnnnnnnnnnnnnnnnnnnnnnnnnnnnnnnnnnnnnnnnnnnnnnnnnnnnnnnnnnnnnnnnnnnnnnnnnnnnnnnnnnnnnnnnnnnnnnnnnnnnnnnnnnnnnnnnnnnnnnnnnnnnnnnnnnnnnnnnnnnnnnnnnnnnnnnnnnnnnnnnnnnnnnnnnnnnnnnnnnnnnnnnnnnnnnnnnnnnnnnnnnnnnnnnnnnnnnnnnnnnnnnnnnnnnnnnnnnnnnnnnnnnnnnnnnnnnnnnnnnnnnnnnnnnnnnnnnnnnnnnnnnnnnnnnnnnnnnnnnnnnnnnnnnnnnnnnnnnnnnnnnnnnnnnnnnnnnnnnnnnnnnnnnnnnnnnnnnnnnnnnnnnnnnnnnnnnnnnnnnnnnnnnnnnnnnnnnnnnnnnnnnnnnnnnnnnnnnnnnnnnnnnnnnnnnnnnnnnnnnnnnnnnnnnnnnnnnnnnnnnnnnnnnnnnnnnnnnnnnnnnnnnnnnnnnnnnnnnnnnnnnnnnnnnnnnnnnnnnnnnnnnnnnnnnnnnnnnnnnnnnnnnnnnnnnnnnnnnnnnnnnnnnnnnnnnnnnnnnnnnnnnnnnnnnnnnnnnnnnnnnnnnnnnnnnnnnnnnnnnnnnnnnnnnnnnnnnnnnnnnnnnnnnnnnnnnnnnnnnnnnnnnnnnnnnnnnnnnnnnnnnnnnnnnnnnnnnnnnnnnnnnnnnnnnnnnnnnnnnnnnnnnnnnnnnnnnnnnnnnnnnnnnnnnnnnnnnnnnnnnnnnnnnnnnnnnnnnnnnnnnnnnnnnnnnnnnnnnnnnnnnnnnnnnnnnnnnnnnnnnnnnnnnnnnnnnnnnnnnnnnnnnnnnnnnnnnnnnnnnnnnnnnnnnnnnnnnnnnnnnnnnnnnnnnnnnnnnnnnnnnnnnnnnnnnnnnnnnnnnnnnnnnnnnnnnnnnnnnnnnnnnnnnnnnnnnnnnnnnnnnnnnnnnnnnnnnnnnnnnnnnnnnnnnnnnnnnnnnnnnnnnnnnnnnnnnnnnnnnnnnnnnnnnnnnnnnnnnnnnnnnnnnnnnnnnnnnnnnnnnnnnnnnnnnnnnnnnnnnnnnnnnnnnnnnnnnnnnnnnnnnnnnnnnnnnnnnnnnnnnnnnnnnnnnnnnnnnnnnnnnnnnnnnnnnnnnnnnnnnnnnnnnnnnnnnnnnnnnnnnnnnnnnnnnnnnnnnnnnnnnnnnnnnnnnnnnnnnnnnnnnnnnnnnnnnnnnnnnnnnnnnnnnnnnnnnnnnnnnnnnnnnnnnnnnnnnnnnnnnnnnnnnnnnnnnnnnnnnnnnnnnnnnnnnnnnnnnnnnnnnnnnnnnnnnnnnnnnnnnnnnnnnnnnnnnnnnnnnnnnnnnnnnnnnnnnnnnnnnnnnnnnnnnnnnnnnnnnnnnnnnnnnnnnnnnnnnnnnnnnnnnnnnnnnnnnnnnnnnnnnnnnnnnnnnnnnnnnnnnnnnnnnnnnnnnnnnnnnnnnnnnnnnnnnnnnnnnnnnnnnnnnnnnnnnnnnnnnnnnnnnnnnnnnnnnnnnnnnnnnnnnnnnnnnnnnnnnnnnnnnnnnnnnnnnnnnnnnnnnnnnnnnnnnnnnnnnnnnnnnnnnnnnnnnnnnnnnnnnnnnnnnnnnnnnnnnnnnnnnnnnnnnnnnnnnnnnnnnnnnnnnnnnnnnnnnnnnnnnnnnnnnnnnnnnnnnnnnnnnnnnnnnnnnnnnnnnnnnnnnnnnnnnnnnnnnnnnnnnnnnnnnnnnnnnnnnnnnnnnnnnnnnnnnnnnnnnnnnnnnnnnnnnnnnnnnnnnnnnnnnnnnnnnnnnnnnnnnnnnnnnnnnnnnnnnnnnnnnnnnnnnnnnnnnnnnnnnnnnnnnnnnnnnnnnnnnnnnnnnnnnnnnnnnnnnnnnnnnnnnnnnnnnnnnnnnnnnnnnnnnnnnnnnnnnnnnnnnnnnnnnnnnnnnnnnnnnnnnnnnnnnnnnnnnnnnnnnnnnnnnnnnnnnnnnnnnnnnnnnnnnnnnnnnnnnnnnnnnnnnnnnnnnnnnnnnnnnnnnnnnnnnnnnnnnnnnnnnnnnnnnnnnnnnnnnnnnnnnnnnnnnnnnnnnnnnnnnnnnnnnnnnnnnnnnnnnnnnnnnnnnnnnnnnnnnnnnnnnnnnnnnnnnnnnnnnnnnnnnnnnnnnnnnnnnnnnnnnnnnnnnnnnnnnnnnnnnnnnnnnnnnnnnnnnnnnnnnnnnnnnnnnnnnnnnnnnnnnnnnnnnnnnnnnnnnnnnnnnnnnnnnnnnnnnnnnnnnnnnnnnnnnnnnnnnnnnnnnnnnnnnnnnnnnnnnnnnnnnnnnnnnnnnnnnnnnnnnnnnnnnnnnnnnnnnnnnnnnnnnnnnnnnnnnnnnnnnnnnnnnnnnnnnnnnnnnnnnnnnnnnnnnnnnnnnnnnnnnnnnnnnnnnnnnnnnnnnnnnnnnnnnnnnnnnnnnnnnnnnnnnnnnnnnnnnnnnnnnnnnnnnnnnnnnnnnnnnnnnnnnnnnnnnnnnnnnnnnnnnnnnnnnnnnnnnnnnnnnnnnnnnnnnnnnnnnnnnnnnnnnnnnnnnnnnnnnnnnnnnnnnnnnnnnnnnnnnnnnnnnnnnnnnnnnnnnnnnnnnnnnnnnnnnnnnnnnnnnnnnnnnnnnnnnnnnnnnnnnnnnnnnnnnnnnnnnnnnnnnnnnnnnnnnnnnnnnnnnnnnnnnnnnnnnnnnnnnnnnnnnnnnnnnnnnnnnnnnnnnnnnnnnnnnnnnnnnnnnnnnnnnnnnnnnnnnnnnnnnnnnnnnnnnnnnnnnnnnnnnnnnnnnnnnnnnnnnnnnnnnnnnnnnnnnnnnnnnnnnnnnnnnnnnnnnnnnnnnnnnnnnnnnnnnnnnnnnnnnnnnnnnnnnnnnnnnnnnnnnnnnnnnnnnnnnnnnnnnnnnnnnnnnnnnnnnnnnnnnnnnnnnnnnnnnnnnnnnnnnnnnnnnnnnnnnnnnnnnnnnnnnnnnnnnnnnnnnnnnnnnnnnnnnnnnnnnnnnnnnnnnnnnnnnnnnnnnnnnnnnnnnnnnnnnnnnnnnnnnnnnnnnnnnnnnnnnnnnnnnnnnnnnnnnnnnnnnnnnnnnnnnnnnnnnnnnnnnnnnnnnnnnnnnnnnnnnnnnnnnnnnnnnnnnnnnnnnnnnnnnnnnnnnnnnnnnnnnnnnnnnnnnnnnnnnnnnnnnnnnnnnnnnnnnnnnnnnnnnnnnnnnnnnnnnnnnnnnnnnnnnnnnnnnnnnnnnnnnnnnnnnnnnnnnnnnnnnnnnnnnnnnnnnnnnnnnnnnnnnnnnnnnnnnnnnnnnnnnnnnnnnnnnnnnnnnnnnnnnnnnnnnnnnnnnnnnnnnnnnnnnnnnnnnnnnnnnnnnnnnnnnnnnnnnnnnnnnnnnnnnnnnnnnnnnnnnnnnnnnnnnnnnnnnnnnnnnnnnnnnnnnnnnnnnnnnnnnnnnnnnnnnnnnnnnnnnnnnnnnnnnnnnnnnnnnnnnnnnnnnnnnnnnnnnnnnnnnnnnnnnnnnnnnnnnnnnnnnnnnnnnnnnnnnnnnnnnnnnnnnnnnnnnnnnnnnnnnnnnnnnnnnnnnnnnnnnnnnnnnnnnnnnnnnnnnnnnnnnnnnnnnnnnnnnnnnnnnnnnnnnnnnnnnnnnnnnnnnnnnnnnnnnnnnnnnnnnnnnnnnnnnnnnnnnnnnnnnnnnnnnnnnnnnnnnnnnnnnnnnnnnnnnnnnnnnnnnnnnnnnnnnnnnnnnnnnnnnnnnnnnnnnnnnnnnnnnnnnnnnnnnnnnnnnnnnnnnnnnnnnnnnnnnnnnnnnnnnnnnnnnnnnnnnnnnnnnnnnnnnnnnnnnnnnnnnnnnnnnnnnnnnnnnnnnnnnnnnnnnnnnnnnnnnnnnnnnnnnnnnnnnnnnnnnnnnnnnnnnnnnnnnnnnnnnnnnnnnnnnnnnnnnnnnnnnnnnnnnnnnnnnnnnnnnnnnnnnnnnnnnnnnnnnnnnnnnnnnnnnnnnnnnnnnnnnnnnnnnnnnnnnnnnnnnnnnnnnnnnnnnnnnnnnnnnnnnnnnnnnnnnnnnnnnnnnnnnnnnnnnnnnnnnnnnnnnnnnnnnnnnnnnnnnnnnnnnnnnnnnnnnnnnnnnnnnnnnnnnnnnnnnnnnnnnnnnnnnnnnnnnnnnnnnnnnnnnnnnnnnnnnnnnnnnnnnnnnnnnnnnnnnnnnnnnnnnnnnnnnnnnnnnnnnnnnnnnnnnnnnnnnnnnnnnnnnnnnnnnnnnnnnnnnnnnnnnnnnnnnnnnnnnnnnnnnnnnnnnnnnnnnnnnnnnnnnnnnnnnnnnnnnnnnnnnnnnnnnnnnnnnnnnnnnnnnnnnnnnnnnnnnnnnnnnnnnnnnnnnnnnnnnnnnnnnnnnnnnnnnnnnnnnnnnnnnnnnnnnnnnnnnnnnnnnnnnnnnnnnnnnnnnnnnnnnnnnnnnnnnnnnnnnnnnnnnnnnnnnnnnnnnnnnnnnnnnnnnnnnnnnnnnnnnnnnnnnnnnnnnnnnnnnnnnnnnnnnnnnnnnnnnnnnnnnnnnnnnnnnnnnnnnnnnnnnnnnnnnnnnnnnnnnnnnnnnnnnnnnnnnnnnnnnnnnnnnnnnnnnnnnnnnnnnnnnnnnnnnnnnnnnnnnnnnnnnnnnnnnnnnnnnnnnnnnnnnnnnnnnnnnnnnnnnnnnnnnnnnnnnnnnnnnnnnnnnnnnnnnnnnnnnnnnnnnnnnnnnnnnnnnnnnnnnnnnnnnnnnnnnnnnnnnnnnnnnnnnnnnnnnnnnnnnnnnnnnnnnnnnnnnnnnnnnnnnnnnnnnnnnnnnnnnnnnnnnnnnnnnnnnnnnnnnnnnnnnnnnnnnnnnnnnnnnnnnnnnnnnnnnnnnnnnnnnnnnnnnnnnnnnnnnnnnnnnnnnnnnnnnnnnnnnnnnnnnnnnnnnnnnnnnnnnnnnnnnnnnnnnnnnnnnnnnnnnnnnnnnnnnnnnnnnnnnnnnnnnnnnnnnnnnnnnnnnnnnnnnnnnnnnnnnnnnnnnnnnnnnnnnnnnnnnnnnnnnnnnnnnnnnnnnnnnnnnnnnnnnnnnnnnnnnnnnnnnnnnnnnnnnnnnnnnnnnnnnnnnnnnnnnnnnnnnnnnnnnnnnnnnnnnnnnnnnnnnnnnnnnnnnnnnnnnnnnnnnnnnnnnnnnnnnnnnnnnnnnnnnnnnnnnnnnnnnnnnnnnnnnnnnnnnnnnnnnnnnnnnnnnnnnnnnnnnnnnnnnnnnnnnnnnnnnnnnnnnnnnnnnnnnnnnnnnnnnnnnnnnnnnnnnnnnnnnnnnnnnnnnnnnnnnnnnnnnnnnnnnnnnnnnnnnnnnnnnnnnnnnnnnnnnnnnnnnnnnnnnnnnnnnnnnnnnnnnnnnnnnnnnnnnnnnnnnnnnnnnnnnnnnnnnnnnnnnnnnnnnnnnnnnnnnnnnnnnnnnnnnnnnnnnnnnnnnnnnnnnnnnnnnnnnnnnnnnnnnnnnnnnnnnnnnnnnnnnnnnnnnnnnnnnnnnnnnnnnnnnnnnnnnnnnnnnnnnnnnnnnnnnnnnnnnnnnnnnnnnnnnnnnnnnnnnnnnnnnnnnnnnnnnnnnnnnnnnnnnnnnnnnnnnnnnnnnnnnnnnnnnnnnnnnnnnnnnnnnnnnnnnnnnnnnnnnnnnnnnnnnnnnnnnnnnnnnnnnnnnnnnnnnnnnnnnnnnnnnnnnnnnnnnnnnnnnnnnnnnnnnnnnnnnnnnnnnnnnnnnnnnnnnnnnnnnnnnnnnnnnnnnnnnnnnnnnnnnnnnnnnnnnnnnnnnnnnnnnnnnnnnnnnnnnnnnnnnnnnnnnnnnnnnnnnnnnnnnnnnnnnnnnnnnnnnnnnnnnnnnnnnnnnnnnnnnnnnnnnnnnnnnnnnnnnnnnnnnnnnnnnnnnnnnnnnnnnnnnnnnnnnnnnnnnnnnnnnnnnnnnnnnnnnnnnnnnnnnnnnnnnnnnnnnnnnnnnnnnnnnnnnnnnnnnnnnnnnnnnnnnnnnnnnnnnnnnnnnnnnnnnnnnnnnnnnnnnnnnnnnnnnnnnnnnnnnnnnnnnnnnnnnnnnnnnnnnnnnnnnnnnnnnnnnnnnnnnnnnnnnnnnnnnnnnnnnnnnnnnnnnnnnnnnnnnnnnnnnnnnnnnnnnnnnnnnnnnnnnnnnnnnnnnnnnnnnnnnnnnnnnnnnnnnnnnnnnnnnnnnnnnnnnnnnnnnnnnnnnnnnnnnnnnnnnnnnnnnnnnnnnnnnnnnnnnnnnnnnnnnnnnnnnnnnnnnnnnnnnnnnnnnnnnnnnnnnnnnnnnnnnnnnnnnnnnnnnnnnnnnnnnnnnnnnnnnnnnnnnnnnnnnnnnnnnnnnnnnnnnnnnnnnnnnnnnnnnnnnnnnnnnnnnnnnnnnnnnnnnnnnnnnnnnnnnnnnnnnnnnnnnnnnnnnnnnnnnnnnnnnnnnnnnnnnnnnnnnnnnnnnnnnnnnnnnnnnnnnnnnnnnnnnnnnnnnnnnnnnnnnnnnnnnnnnnnnnnnnnnnnnnnnnnnnnnnnnnnnnnnnnnnnnnnnnnnnnnnnnnnnnnnnnnnnnnnnnnnnnnnnnnnnnnnnnnnnnnnnnnnnnnnnnnnnnnnnnnnnnnnnnnnnnnnnnnnnnnnnnnnnnnnnnnnnnnnnnnnnnnnnnnnnnnnnnnnnnnnnnnnnnnnnnnnnnnnnnnnnnnnnnnnnnnnnnnnnnnnnnnnnnnnnnnnnnnnnnnnnnnnnnnnnnnnnnnnnnnnnnnnnnnnnnnnnnnnnnnnnnnnnnnnnnnnnnnnnnnnnnnnnnnnnnnnnnnnnnnnnnnnnnnnnnnnnnnnnnnnnnnnnnnnnnnnnnnnnnnnnnnnnnnnnnnnnnnnnnnnnnnnnnnnnnnnnnnnnnnnnnnnnnnnnnnnnnnnnnnnnnnnnnnnnnnnnnnnnnnnnnnnnnnnnnnnnnnnnnnnnnnnnnnnnnnnnnnnnnnnnnnnnnnnnnnnnnnnnnnnnnnnnnnnnnnnnnnnnnnnnnnnnnnnnnnnnnnnnnnnnnnnnnnnnnnnnnnnnnnnnnnnnnnnnnnnnnnnnnnnnnnnnnnnnnnnnnnnnnnnnnnnnnnnnnnnnnnnnnnnnnnnnnnnnnnnnnnnnnnnnnnnnnnnnnnnnnnnnnnnnnnnnnnnnnnnnnnnnnnnnnnnnnnnnnnnnnnnnnnnnnnnnnnnnnnnnnnnnnnnnnnnnnnnnnnnnnnnnnnnnnnnnnnnnnnnnnnnnnnnnnnnnnnnnnnnnnnnnnnnnnnnnnnnnnnnnnnnnnnnnnnnnnnnnnnnnnnnnnnnnnnnnnnnnnnnnnnnnnnnnnnnnnnnnnnnnnnnnnnnnnnnnnnnnnnnnnnnnnnnnnnnnnnnnnnnnnnnnnnnnnnnnnnnnnnnnnnnnnnnnnnnnnnnnnnnnnnnnnnnnnnnnnnnnnnnnnnnnnnnnnnnnnnnnnnnnnnnnnnnnnnnnnnnnnnnnnnnnnnnnnnnnnnnnnnnnnnnnnnnnnnnnnnnnnnnnnnnnnnnnnnnnnnnnnnnnnnnnnnnnnnnnnnnnnnnnnnnnnnnnnnnnnnnnnnnnnnnnnnnnnnnnnnnnnnnnnnnnnnnnnnnnnnnnnnnnnnnnnnnnnnnnnnnnnnnnnnnnnnnnnnnnnnnnnnnnnnnnnnnnnnnnnnnnnnnnnnnnnnnnnnnnnnnnnnnnnnnnnnnnnnnnnnnnnnnnnnnnnnnnnnnnnnnnnnnnnnnnnnnnnnnnnnnnnnnnnnnnnnnnnnnnnnnnnnnnnnnnnnnnnnnnnnnnnnnnnnnnnnnnnnnnnnnnnnnnnnnnnnnnnnnnnnnnnnnnnnnnnnnnnnnnnnnnnnnnnnnnnnnnnnnnnnnnnnnnnnnnnnnnnnnnnnnnnnnnnnnnnnnnnnnnnnnnnnnnnnnnnnnnnnnnnnnnnnnnnnnnnnnnnnnnnnnnnnnnnnnnnnnnnnnnnnnnnnnnnnnnnnnnnnnnnnnnnnnnnnnnnnnnnnnnnnnnnnnnnnnnnnnnnnnnnnnnnnnnnnnnnnnnnnnnnnnnnnnnnnnnnnnnnnnnnnnnnnnnnnnnnnnnnnnnnnnnnnnnnnnnnnnnnnnnnnnnnnnnnnnnnnnnnnnnnnnnnnnnnnnnnnnnnnnnnnnnnnnnnnnnnnnnnnnnnnnnnnnnnnnnnnnnnnnnnnnnnnnnnnnnnnnnnnnnnnnnnnnnnnnnnnnnnnnnnnnnnnnnnnnnnnnnnnnnnnnnnnnnnnnnnnnnnnnnnnnnnnnnnnnnnnnnnnnnnnnnnnnnnnnnnnnnnnnnnnnnnnnnnnnnnnnnnnnnnnnnnnnnnnnnnnnnnnnnnnnnnnnnnnnnnnnnnnnnnnnnnnnnnnnnnnnnnnnnnnnnnnnnnnnnnnnnnnnnnnnnnnnnnnnnnnnnnnnnnnnnnnnnnnnnnnnnnnnnnnnnnnnnnnnnnnnnnnnnnnnnnnnnnnnnnnnnnnnnnnnnnnnnnnnnnnnnnnnnnnnnnnnnnnnnnnnnnnnnnnnnnnnnnnnnnnnnnnnnnnnnnnnnnnnnnnnnnnnnnnnnnnnnnnnnnnnnnnnnnnnnnnnnnnnnnnnnnnnnnnnnnnnnnnnnnnnnnnnnnnnnnnnnnnnnnnnnnnnnnnnnnnnnnnnnnnnnnnnnnnnnnnnnnnnnnnnnnnnnnnnnnnnnnnnnnnnnnnnnnnnnnnnnnnnnnnnnnnnnnnnnnnnnnnnnnnnnnnnnnnnnnnnnnnnnnnnnnnnnnnnnnnnnnnnnnnnnnnnnnnnnnnnnnnnnnnnnnnnnnnnnnnnnnnnnnnnnnnnnnnnnnnnnnnnnnnnnnnnnnnnnnnnnnnnnnnnnnnnnnnnnnnnnnnnnnnnnnnnnnnnnnnnnnnnnnnnnnnnnnnnnnnnnnnnnnnnnnnnnnnnnnnnnnnnnnnnnnnnnnnnnnnnnnnnnnnnnnnnnnnnnnnnnnnnnnnnnnnnnnnnnnnnnnnnnnnnnnnnnnnnnnnnnnnnnnnnnnnnnnnnnnnnnnnnnnnnnnnnnnnnnnnnnnnnnnnnnnnnnnnnnnnnnnnnnnnnnnnnnnnnnnnnnnnnnnnnnnnnnnnnnnnnnnnnnnnnnnnnnnnnnnnnnnnnnnnnnnnnnnnnnnnnnnnnnnnnnnnnnnnnnnnnnnnnnnnnnnnnnnnnnnnnnnnnnnnnnnnnnnnnnnnnnnnnnnnnnnnnnnnnnnnnnnnnnnnnnnnnnnnnnnnnnnnnnnnnnnnnnnnnnnnnnnnnnnnnnnnnnnnnnnnnnnnnnnnnnnnnnnnnnnnnnnnnnnnnnnnnnnnnnnnnnnnnnnnnnnnnnnnnnnnnnnnnnnnnnnnnnnnnnnnnnnnnnnnnnnnnnnnnnnnnnnnnnnnnnnnnnnnnnnnnnnnnnnnnnnnnnnnnnnnnnnnnnnnnnnnnnnnnnnnnnnnnnnnnnnnnnnnnnnnnnnnnnnnnnnnnnnnnnnnnnnnnnnnnnnnnnnnnnnnnnnnnnnnnnnnnnnnnnnnnnnnnnnnnnnnnnnnnnnnnnnnnnnnnnnnnnnnnnnnnnnnnnnnnnnnnnnnnnnnnnnnnnnnnnnnnnnnnnnnnnnnnnnnnnnnnnnnnnnnnnnnnnnnnnnnnnnnnnnnnnnnnnnnnnnnnnnnnnnnnnnnnnnnnnnnnnnnnnnnnnnnnnnnnnnnnnnnnnnnnnnnnnnnnnnnnnnnnnnnnnnnnnnnnnnnnnnnnnnnnnnnnnnnnnnnnnnnnnnnnnnnnnnnnnnnnnnnnnnnnnnnnnnnnnnnnnnnnnnnnnnnnnnnnnnnnnnnnnnnnnnnnnnnnnnnnnnnnnnnnnnnnnnnnnnnnnnnnnnnnnnnnnnnnnnnnnnnnnnnnnnnnnnnnnnnnnnnnnnnnnnnnnnnnnnnnnnnnnnnnnnnnnnnnnnnnnnnnnnnnnnnnnnnnnnnnnnnnnnnnnnnnnnnnnnnnnnnnnnnnnnnnnnnnnnnnnnnnnnnnnnnnnnnnnnnnnnnnnnnnnnnnnnnnnnnnnnnnnnnnnnnnnnnnnnnnnnnnnnnnnnnnnnnnnnnnnnnnnnnnnnnnnnnnnnnnnnnnnnnnnnnnnnnnnnnnnnnnnnnnnnnnnnnnnnnnnnnnnnnnnnnnnnnnnnnnnnnnnnnnnnnnnnnnnnnnnnnnnnnnnnnnnnnnnnnnnnnnnnnnnnnnnnnnnnnnnnnnnnnnnnnnnnnnnnnnnnnnnnnnnnnnnnnnnnnnnnnnnnnnnnnnnnnnnnnnnnnnnnnnnnnnnnnnnnnnnnnnnnnnnnnnnnnnnnnnnnnnnnnnnnnnnnnnnnnnnnnnnnnnnnnnnnnnnnnnnnnnnnnnnnnnnnnnnnnnnnnnnnnnnnnnnnnnnnnnnnnnnnnnnnnnnnnnnnnnnnnnnnnnnnnnnnnnnnnnnnnnnnnnnnnnnnnnnnnnnnnnnnnnnnnnnnnnnnnnnnnnnnnnnnnnnnnnnnnnnnnnnnnnnnnnnnnnnnnnnnnnnnnnnnnnnnnnnnnnnnnnnnnnnnnnnnnnnnnnnnnnnnnnnnnnnnnnnnnnnnnnnnnnnnnnnnnnnnnnnnnnnnnnnnnnnnnnnnnnnnnnnnnnnnnnnnnnnnnnnnnnnnnnnnnnnnnnnnnnnnnnnnnnnnnnnnnnnnnnnnnnnnnnnnnnnnnnnnnnnnnnnnnnnnnnnnnnnnnnnnnnnnnnnnnnnnnnnnnnnnnnnnnnnnnnnnnnnnnnnnnnnnnnnnnnnnnnnnnnnnnnnnnnnnnnnnnnnnnnnnnnnnnnnnnnnnnnnnnnnnnnnnnnnnnnnnnnnnnnnnnnnnnnnnnnnnnnnnnnnnnnnnnnnnnnnnnnnnnnnnnnnnnnnnnnnnnnnnnnnnnnnnnnnnnnnnnnnnnnnnnnnnnnnnnnnnnnnnnnnnnnnnnnnnnnnnnnnnnnnnnnnnnnnnnnnnnnnnnnnnnnnnnnnnnnnnnnnnnnnnnnnnnnnnnnnnnnnnnnnnnnnnnnnnnnnnnnnnnnnnnnnnnnnnnnnnnnnnnnnnnnnnnnnnnnnnnnnnnnnnnnnnnnnnnnnnnnnnnnnnnnnnnnnnnnnnnnnnnnnnnnnnnnnnnnnnnnnnnnnnnnnnnnnnnnnnnnnnnnnnnnnnnnnnnnnnnnnnnnnnnnnnnnnnnnnnnnnnnnnnnnnnnnnnnnnnnnnnnnnnnnnnnnnnnnnnnnnnnnnnnnnnnnnnnnnnnnnnnnnnnnnnnnnnnnnnnnnnnnnnnnnnnnnnnnnnnnnnnnnnnnnnnnnnnnnnnnnnnnnnnnnnnnnnnnnnnnnnnnnnnnnnnnnnnnnnnnnnnnnnnnnnnnnnnnnnnnnnnnnnnnnnnnnnnnnnnnnnnnnnnnnnnnnnnnnnnnnnnnnnnnnnnnnnnnnnnnnnnnnnnnnnnnnnnnnnnnnnnnnnnnnnnnnnnnnnnnnnnnnnnnnnnnnnnnnnnnnnnnnnnnnnnnnnnnnnnnnnnnnnnnnnnnnnnnnnnnnnnnnnnnnnnnnnnnnnnnnnnnnnnnnnnnnnnnnnnnnnnnnnnnnnnnnnnnnnnnnnnnnnnnnnnnnnnnnnnnnnnnnnnnnnnnnnnnnnnnnnnnnnnnnnnnnnnnnnnnnnnnnnnnnnnnnnnnnnnnnnnnnnnnnnnnnnnnnnnnnnnnnnnnnnnnnnnnnnnnnnnnnnnnnnnnnnnnnnnnnnnnnnnnnnnnnnnnnnnnnnnnnnnnnnnnnnnnnnnnnnnnnnnnnnnnnnnnnnnnnnnnnnnnnnnnnnnnnnnnnnnnnnnnnnnnnnnnnnnnnnnnnnnnnnnnnnnnnnnnnnnnnnnnnnnnnnnnnnnnnnnnnnnnnnnnnnnnnnnnnnnnnnnnnnnnnnnnnnnnnnnnnnnnnnnnnnnnnnnnnnnnnnnnnnnnnnnnnnnnnnnnnnnnnnnnnnnnnnnnnnnnnnnnnnnnnnnnnnnnnnnnnnnnnnnnnnnnnnnnnnnnnnnnnnnnnnnnnnnnnnnnnnnnnnnnnnnnnnnnnnnnnnnnnnnnnnnnnnnnnnnnnnnnnnnnnnnnnnnnnnnnnnnnnnnnnnnnnnnnnnnnnnnnnnnnnnnnnnnnnnnnnnnnnnnnnnnnnnnnnnnnnnnnnnnnnnnnnnnnnnnnnnnnnnnnnnnnnnnnnnnnnnnnnnnnnnnnnnnnnnnnnnnnnnnnnnnnnnnnnnnnnnnnnnnnnnnnnnnnnnnnnnnnnnnnnnnnnnnnnnnnnnnnnnnnnnnnnnnnnnnnnnnnnnnnnnnnnnnnnnnnnnnnnnnnnnnnnnnnnnnnnnnnnnnnnnnnnnnnnnnnnnnnnnnnnnnnnnnnnnnnnnnnnnnnnnnnnnnnnnnnnnnnnnnnnnnnnnnnnnnnnnnnnnnnnnnnnnnnnnnnnnnnnnnnnnnnnnnnnnnnnnnnnnnnnnnnnnnnnnnnnnnnnnnnnnnnnnnnnnnnnnnnnnnnnnnnnnnnnnnnnnnnnnnnnnnnnnnnnnnnnnnnnnnnnnnnnnnnnnnnnnnnnnnnnnnnnnnnnnnnnnnnnnnnnnnnnnnnnnnnnnnnnnnnnnnnnnnnnnnnnnnnnnnnnnnnnnnnnnnnnnnnnnnnnnnnnnnnnnnnnnnnnnnnnnnnnnnnnnnnnnnnnnnnnnnnnnnnnnnnnnnnnnnnnnnnnnnnnnnnnnnnnnnnnnnnnnnnnnnnnnnnnnnnnnnnnnnnnnnnnnnnnnnnnnnnnnnnnnnnnnnnnnnnnnnnnnnnnnnnnnnnnnnnnnnnnnnnnnnnnnnnnnnnnnnnnnnnnnnnnnnnnnnnnnnnnnnnnnnnnnnnnnnnnnnnnnnnnnnnnnnnnnnnnnnnnnnnnnnnnnnnnnnnnnnnnnnnnnnnnnnnnnnnnnnnnnnnnnnnnnnnnnnnnnnnnnnnnnnnnnnnnnnnnnnnnnnnnnnnnnnnnnnnnnnnnnnnnnnnnnnnnnnnnnnnnnnnnnnnnnnnnnnnnnnnnnnnnnnnnnnnnnnnnnnnnnnnnnnnnnnnnnnnnnnnnnnnnnnnnnnnnnnnnnnnnnnnnnnnnnnnnnnnnnnnnnnnnnnnnnnnnnnnnnnnnnnnnnnnnnnnnnnnnnnnnnnnnnnnnnnnnnnnnnnnnnnnnnnnnnnnnnnnnnnnnnnnnnnnnnnnnnnnnnnnnnnnnnnnnnnnnnnnnnnnnnnnnnnnnnnnnnnnnnnnnnnnnnnnnnnnnnnnnnnnnnnnnnnnnnnnnnnnnnnnnnnnnnnnnnnnnnnnnnnnnnnnnnnnnnnnnnnnnnnnnnnnnnnnnnnnnnnnnnnnnnnnnnnnnnnnnnnnnnnnnnnnnnnnnnnnnnnnnnnnnnnnnnnnnnnnnnnnnnnnnnnnnnnnnnnnnnnnnnnnnnnnnnnnnnnnnnnnnnnnnnnnnnnnnnnnnnnnnnnnnnnnnnnnnnnnnnnnnnnnnnnnnnnnnnnnnnnnnnnnnnnnnnnnnnnnnnnnnnnnnnnnnnnnnnnnnnnnnnnnnnnnnnnnnnnnnnnnnnnnnnnnnnnnnnnnnnnnnnnnnnnnnnnnnnnnnnnnnnnnnnnnnnnnnnnnnnnnnnnnnnnnnnnnnnnnnnnnnnnnnnnnnnnnnnnnnnnnnnnnnnnnnnnnnnnnnnnnnnnnnnnnnnnnnnnnnnnnnnnnnnnnnnnnnnnnnnnnnnnnnnnnnnnnnnnnnnnnnnnnnnnnnnnnnnnnnnnnnnnnnnnnnnnnnnnnnnnnnnnnnnnnnnnnnnnnnnnnnnnnnnnnnnnnnnnnnnnnnnnnnnnnnnnnnnnnnnnnnnnnnnnnnnnnnnnnnnnnnnnnnnnnnnnnnnnnnnnnnnnnnnnnnnnnnnnnnnnnnnnnnnnnnnnnnnnnnnnnnnnnnnnnnnnnnnnnnnnnnnnnnnnnnnnnnnnnnnnnnnnnnnnnnnnnnnnnnnnnnnnnnnnnnnnnnnnnnnnnnnnnnnnnnnnnnnnnnnnnnnnnnnnnnnnnnnnnnnnnnnnnnnnnnnnnnnnnnnnnnnnnnnnnnnnnnnnnnnnnnnnnnnnnnnnnnnnnnnnnnnnnnnnnnnnnnnnnnnnnnnnnnnnnnnnnnnnnnnnnnnnnnnnnnnnnnnnnnnnnnnnnnnnnnnnnnnnnnnnnnnnnnnnnnnnnnnnnnnnnnnnnnnnnnnnnnnnnnnnnnnnnnnnnnnnnnnnnnnnnnnnnnnnnnnnnnnnnnnnnnnnnnnnnnnnnnnnnnnnnnnnnnnnnnnnnnnnnnnnnnnnnnnnnnnnnnnnnnnnnnnnnnnnnnnnnnnnnnnnnnnnnnnnnnnnnnnnnnnnnnnnnnnnnnnnnnnnnnnnnnnnnnnnnnnnnnnnnnnnnnnnnnnnnnnnnnnnnnnnnnnnnnnnnnnnnnnnnnnnnnnnnnnnnnnnnnnnnnnnnnnnnnnnnnnnnnnnnnnnnnnnnnnnnnnnnnnnnnnnnnnnnnnnnnnnnnnnnnnnnnnnnnnnnnnnnnnnnnnnnnnnnnnnnnnnnnnnnnnnnnnnnnnnnnnnnnnnnnnnnnnnnnnnnnnnnnnnnnnnnnnnnnnnnnnnnnnnnnnnnnnnnnnnnnnnnnnnnnnnnnnnnnnnnnnnnnnnnnnnnnnnnnnnnnnnnnnnnnnnnnnnnnnnnnnnnnnnnnnnnnnnnnnnnnnnnnnnnnnnnnnnnnnnnnnnnnnnnnnnnnnnnnnnnnnnnnnnnnnnnnnnnnnnnnnnnnnnnnnnnnnnnnnnnnnnnnnnnnnnnnnnnnnnnnnnnnnnnnnnnnnnnnnnnnnnnnnnnnnnnnnnnnnnnnnnnnnnnnnnnnnnnnnnnnnnnnnnnnnnnnnnnnnnnnnnnnnnnnnnnnnnnnnnnnnnnnnnnnnnnnnnnnnnnnnnnnnnnnnnnnnnnnnnnnnnnnnnnnnnnnnnnnnnnnnnnnnnnnnnnnnnnnnnnnnnnnnnnnnnnnnnnnnnnnnnnnnnnnnnnnnnnnnnnnnnnnnnnnnnnnnnnnnnnnnnnnnnnnnnnnnnnnnnnnnnnnnnnnnnnnnnnnnnnnnnnnnnnnnnnnnnnnnnnnnnnnnnnnnnnnnnnnnnnnnnnnnnnnnnnnnnnnnnnnnnnnnnnnnnnnnnnnnnnnnnnnnnnnnnnnnnnnnnnnnnnnnnnnnnnnnnnnnnnnnnnnnnnnnnnnnnnnnnnnnnnnnnnnnnnnnnnnnnnnnnnnnnnnnnnnnnnnnnnnnnnnnnnnnnnnnnnnnnnnnnnnnnnnnnnnnnnnnnnnnnnnnnnnnnnnnnnnnnnnnnnnnnnnnnnnnnnnnnnnnnnnnnnnnnnnnnnnnnnnnnnnnnnnnnnnnnnnnnnnnnnnnnnnnnnnnnnnnnnnnnnnnnnnnnnnnnnnnnnnnnnnnnnnnnnnnnnnnnnnnnnnnnnnnnnnnnnnnnnnnnnnnnnnnnnnnnnnnnnnnnnnnnnnnnnnnnnnnnnnnnnnnnnnnnnnnnnnnnnnnnnnnnnnnnnnnnnnnnnnnnnnnnnnnnnnnnnnnnnnnnnnnnnnnnnnnnnnnnnnnnnnnnnnnnnnnnnnnnnnnnnnnnnnnnnnnnnnnnnnnnnnnnnnnnnnnnnnnnnnnnnnnnnnnnnnnnnnnnnnnnnnnnnnnnnnnnnnnnnnnnnnnnnnnnnnnnnnnnnnnnnnnnnnnnnnnnnnnnnnnnnnnnnnnnnnnnnnnnnnnnnnnnnnnnnnnnnnnnnnnnnnnnnnnnnnnnnnnnnnnnnnnnnnnnnnnnnnnnnnnnnnnnnnnnnnnnnnnnnnnnnnnnnnnnnnnnnnnnnnnnnnnnnnnnnnnnnnnnnnnnnnnnnnnnnnnnnnnnnnnnnnnnnnnnnnnnnnnnnnnnnnnnnnnnnnnnnnnnnnnnnnnnnnnnnnnnnnnnnnnnnnnnnnnnnnnnnnnnnnnnnnnnnnnnnnnnnnnnnnnnnnnnnnnnnnnnnnnnnnnnnnnnnnnnnnnnnnnnnnnnnnnnnnnnnnnnnnnnnnnnnnnnnnnnnnnnnnnnnnnnnnnnnnnnnnnnnnnnnnnnnnnnnnnnnnnnnnnnnnnnnnnnnnnnnnnnnnnnnnnnnnnnnnnnnnnnnnnnnnnnnnnnnnnnnnnnnnnnnnnnnnnnnnnnnnnnnnnnnnnnnnnnnnnnnnnnnnnnnnnnnnnnnnnnnnnnnnnnnnnnnnnnnnnnnnnnnnnnnnnnnnnnnnnnnnnnnnnnnnnnnnnnnnnnnnnnnnnnnnnnnnnnnnnnnnnnnnnnnnnnnnnnnnnnnnnnnnnnnnnnnnnnnnnnnnnnnnnnnnnnnnnnnnnnnnnnnnnnnnnnnnnnnnnnnnnnnnnnnnnnnnnnnnnnnnnnnnnnnnnnnnnnnnnnnnnnnnnnnnnnnnnnnnnnnnnnnnnnnnnnnnnnnnnnnnnnnnnnnnnnnnnnnnnnnnnnnnnnnnnnnnnnnnnnnnnnnnnnnnnnnnnnnnnnnnnnnnnnnnnnnnnnnnnnnnnnnnnnnnnnnnnnnnnnnnnnnnnnnnnnnnnnnnnnnnnnnnnnnnnnnnnnnnnnnnnnnnnnnnnnnnnnnnnnnnnnnnnnnnnnnnnnnnnnnnnnnnnnnnnnnnnnnnnnnnnnnnnnnnnnnnnnnnnnnnnnnnnnnnnnnnnnnnnnnnnnnnnnnnnnnnnnnnnnnnnnnnnnnnnnnnnnnnnnnnnnnnnnnnnnnnnnnnnnnnnnnnnnnnnnnnnnnnnnnnnnnnnnnnnnnnnnnnnnnnnnnnnnnnnnnnnnnnnnnnnnnnnnnnnnnnnnnnnnnnnnnnnnnnnnnnnnnnnnnnnnnnnnnnnnnnnnnnnnnnnnnnnnnnnnnnnnnnnnnnnnnnnnnnnnnnnnnnnnnnnnnnnnnnnnnnnnnnnnnnnnnnnnnnnnnnnnnnnnnnnnnnnnnnnnnnnnnnnnnnnnnnnnnnnnnnnnnnnnnnnnnnnnnnnnnnnnnnnnnnnnnnnnnnnnnnnnnnnnnnnnnnnnnnnnnnnnnnnnnnnnnnnnnnnnnnnnnnnnnnnnnnnnnnnnnnnnnnnnnnnnnnnnnnnnnnnnnnnnnnnnnnnnnnnnnnnnnnnnnnnnnnnnnnnnnnnnnnnnnnnnnnnnnnnnnnnnnnnnnnnnnnnnnnnnnnnnnnnnnnnnnnnnnnnnnnnnnnnnnnnnnnnnnnnnnnnnnnnnnnnnnnnnnnnnnnnnnnnnnnnnnnnnnnnnnnnnnnnnnnnnnnnnnnnnnnnnnnnnnnnnnnnnnnnnnnnnnnnnnnnnnnnnnnnnnnnnnnnnnnnnnnnnnnnnnnnnnnnnnnnnnnnnnnnnnnnnnnnnnnnnnnnnnnnnnnnnnnnnnnnnnnnnnnnnnnnnnnnnnnnnnnnnnnnnnnnnnnnnnnnnnnnnnnnnnnnnnnnnnnnnnnnnnnnnnnnnnnnnnnnnnnnnnnnnnnnnnnnnnnnnnnnnnnnnnnnnnnnnnnnnnnnnnnnnnnnnnnnnnnnnnnnnnnnnnnnnnnnnnnnnnnnnnnnnnnnnnnnnnnnnnnnnnnnnnnnnnnnnnnnnnnnnnnnnnnnnnnnnnnnnnnnnnnnnnnnnnnnnnnnnnnnnnnnnnnnnnnnnnnnnnnnnnnnnnnnnnnnnnnnnnnnnnnnnnnnnnnnnnnnnnnnnnnnnnnnnnnnnnnnnnnnnnnnnnnnnnnnnnnnnnnnnnnnnnnnnnnnnnnnnnnnnnnnnnnnnnnnnnnnnnnnnnnnnnnnnnnnnnnnnnnnnnnnnnnnnnnnnnnnnnnnnnnnnnnnnnnnnnnnnnnnnnnnnnnnnnnnnnnnnnnnnnnnnnnnnnnnnnnnnnnnnnnnnnnnnnnnnnnnnnnnnnnnnnnnnnnnnnnnnnnnnnnnnnnnnnnnnnnnnnnnnnnnnnnnnnnnnnnnnnnnnnnnnnnnnnnnnnnnnnnnnnnnnnnnnnnnnnnnnnnnnnnnnnnnnnnnnnnnnnnnnnnnnnnnnnnnnnnnnnnnnnnnnnnnnnnnnnnnnnnnnnnnnnnnnnnnnnnnnnnnnnnnnnnnnnnnnnnnnnnnnnnnnnnnnnnnnnnnnnnnnnnnnnnnnnnnnnnnnnnnnnnnnnnnnnnnnnnnnnnnnnnnnnnnnnnnnnnnnnnnnnnnnnnnnnnnnnnnnnnnnnnnnnnnnnnnnnnnnnnnnnnnnnnnnnnnnnnnnnnnnnnnnnnnnnnnnnnnnnnnnnnnnnnnnnnnnnnnnnnnnnnnnnnnnnnnnnnnnnnnnnnnnnnnnnnnnnnnnnnnnnnnnnnnnnnnnnnnnnnnnnnnnnnnnnnnnnnnnnnnnnnnnnnnnnnnnnnnnnnnnnnnnnnnnnnnnnnnnnnnnnnnnnnnnnnnnnnnnnnnnnnnnnnnnnnnnnnnnnnnnnnnnnnnnnnnnnnnnnnnnnnnnnnnnnnnnnnnnnnnnnnnnnnnnnnnnnnnnnnnnnnnnnnnnnnnnnnnnnnnnnnnnnnnnnnnnnnnnnnnnnnnnnnnnnnnnnnnnnnnnnnnnnnnnnnnnnnnnnnnnnnnnnnnnnnnnnnnnnnnnnnnnnnnnnnnnnnnnnnnnnnnnnnnnnnnnnnnnnnnnnnnnnnnnnnnnnnnnnnnnnnnnnnnnnnnnnnnnnnnnnnnnnnnnnnnnnnnnnnnnnnnnnnnnnnnnnnnnnnnnnnnnnnnnnnnnnnnnnnnnnnnnnnnnnnnnnnnnnnnnnnnnnnnnnnnnnnnnnnnnnnnnnnnnnnnnnnnnnnnnnnnnnnnnnnnnnnnnnnnnnnnnnnnnnnnnnnnnnnnnnnnnnnnnnnnnnnnnnnnnnnnnnnnnnnnnnnnnnnnnnnnnnnnnnnnnnnnnnnnnnnnnnnnnnnnnnnnnnnnnnnnnnnnnnnnnnnnnnnnnnnnnnnnnnnnnnnnnnnnnnnnnnnnnnnnnnnnnnnnnnnnnnnnnnnnnnnnnnnnnnnnnnnnnnnnnnnnnnnnnnnnnnnnnnnnnnnnnnnnnnnnnnnnnnnnnnnnnnnnnnnnnnnnnnnnnnnnnnnnnnnnnnnnnnnnnnnnnnnnnnnnnnnnnnnnnnnnnnnnnnnnnnnnnnnnnnnnnnnnnnnnnnnnnnnnnnnnnnnnnnnnnnnnnnnnnnnnnnnnnnnnnnnnnnnnnnnnnnnnnnnnnnnnnnnnnnnnnnnnnnnnnnnnnnnnnnnnnnnnnnnnnnnnnnnnnnnnnnnnnnnnnnnnnnnnnnnnnnnnnnnnnnnnnnnnnnnnnnnnnnnnnnnnnnnnnnnnnnnnnnnnnnnnnnnnnnnnnnnnnnnnnnnnnnnnnnnnnnnnnnnnnnnnnnnnnnnnnnnnnnnnnnnnnnnnnnnnnnnnnnnnnnnnnnnnnnnnnnnnnnnnnnnnnnnnnnnnnnnnnnnnnnnnnnnnnnnnnnnnnnnnnnnnnnnnnnnnnnnnnnnnnnnnnnnnnnnnnnnnnnnnnnnnnnnnnnnnnnnnnnnnnnnnnnnnnnnnnnnnnnnnnnnnnnnnnnnnnnnnnnnnnnnnnnnnnnnnnnnnnnnnnnnnnnnnnnnnnnnnnnnnnnnnnnnnnnnnnnnnnnnnnnnnnnnnnnnnnnnnnnnnnnnnnnnnnnnnnnnnnnnnnnnnnnnnnnnnnnnnnnnnnnnnnnnnnnnnnnnnnnnnnnnnnnnnnnnnnnnnnnnnnnnnnnnnnnnnnnnnnnnnnnnnnnnnnnnnnnnnnnnnnnnnnnnnnnnnnnnnnnnnnnnnnnnnnnnnnnnnnnnnnnnnnnnnnnnnnnnnnnnnnnnnnnnnnnnnnnnnnnnnnnnnnnnnnnnnnnnnnnnnnnnnnnnnnnnnnnnnnnnnnnnnnnnnnnnnnnnnnnnnnnnnnnnnnnnnnnnnnnnnnnnnnnnnnnnnnnnnnnnnnnnnnnnnnnnnnnnnnnnnnnnnnnnnnnnnnnnnnnnnnnnnnnnnnnnnnnnnnnnnnnnnnnnnnnnnnnnnnnnnnnnnnnnnnnnnnnnnnnnnnnnnnnnnnnnnnnnnnnnnnnnnnnnnnnnnnnnnnnnnnnnnnnnnnnnnnnnnnnnnnnnnnnnnnnnnnnnnnnnnnnnnnnnnnnnnnnnnnnnnnnnnnnnnnnnnnnnnnnnnnnnnnnnnnnnnnnnnnnnnnnnnnnnnnnnnnnnnnnnnnnnnnnnnnnnnnnnnnnnnnnnnnnnnnnnnnnnnnnnnnnnnnnnnnnnnnnnnnnnnnnnnnnnnnnnnnnnnnnnnnnnnnnnnnnnnnnnnnnnnnnnnnnnnnnnnnnnnnnnnnnnnnnnnnnnnnnnnnnnnnnnnnnnnnnnnnnnnnnnnnnnnnnnnnnnnnnnnnnnnnnnnnnnnnnnnnnnnnnnnnnnnnnnnnnnnnnnnnnnnnnnnnnnnnnnnnnnnnnnnnnnnnnnnnnnnnnnnnnnnnnnnnnnnnnnnnnnnnnnnnnnnnnnnnnnnnnnnnnnnnnnnnnnnnnnnnnnnnnnnnnnnnnnnnnnnnnnnnnnnnnnnnnnnnnnnnnnnnnnnnnnnnnnnnnnnnnnnnnnnnnnnnnnnnnnnnnnnnnnnnnnnnnnnnnnnnnnnnnnnnnnnnnnnnnnnnnnnnnnnnnnnnnnnnnnnnnnnnnnnnnnnnnnnnnnnnnnnnnnnnnnnnnnnnnnnnnnnnnnnnnnnnnnnnnnnnnnnnnnnnnnnnnnnnnnnnnnnnnnnnnnnnnnnnnnnnnnnnnnnnnnnnnnnnnnnnnnnnnnnnnnnnnnnnnnnnnnnnnnnnnnnnnnnnnnnnnnnnnnnnnnnnnnnnnnnnnnnnnnnnnnnnnnnnnnnnnnnnnnnnnnnnnnnnnnnnnnnnnnnnnnnnnnnnnnnnnnnnnnnnnnnnnnnnnnnnnnnnnnnnnnnnnnnnnnnnnnnnnnnnnnnnnnnnnnnnnnnnnnnnnnnnnnnnnnnnnnnnnnnnnnnnnnnnnnnnnnnnnnnnnnnnnnnnnnnnnnnnnnnnnnnnnnnnnnnnnnnnnnnnnnnnnnnnnnnnnnnnnnnnnnnnnnnnnnnnnnnnnnnnnnnnnnnnnnnnnnnnnnnnnnnnnnnnnnnnnnnnnnnnnnnnnnnnnnnnnnnnnnnnnnnnnnnnnnnnnnnnnnnnnnnnnnnnnnnnnnnnnnnnnnnnnnnnnnnnnnnnnnnnnnnnnnnnnnnnnnnnnnnnnnnnnnnnnnnnnnnnnnnnnnnnnnnnnnnnnnnnnnnnnnnnnnnnnnnnnnnnnnnnnnnnnnnnnnnnnnnnnnnnnnnnnnnnnnnnnnnnnnnnnnnnnnnnnnnnnnnnnnnnnnnnnnnnnnnnnnnnnnnnnnnnnnnnnnnnnnnnnnnnnnnnnnnnnnnnnnnnnnnnnnnnnnnnnnnnnnnnnnnnnnnnnnnnnnnnnnnnnnnnnnnnnnnnnnnnnnnnnnnnnnnnnnnnnnnnnnnnnnnnnnnnnnnnnnnnnnnnnnnnnnnnnnnnnnnnnnnnnnnnnnnnnnnnnnnnnnnnnnnnnnnnnnnnnnnnnnnnnnnnnnnnnnnnnnnnnnnnnnnnnnnnnnnnnnnnnnnnnnnnnnnnnnnnnnnnnnnnnnnnnnnnnnnnnnnnnnnnnnnnnnnnnnnnnnnnnnnnnnnnnnnnnnnnnnnnnnnnnnnnnnnnnnnnnnnnnnnnnnnnnnnnnnnnnnnnnnnnnnnnnnnnnnnnnnnnnnnnnnnnnnnnnnnnnnnnnnnnnnnnnnnnnnnnnnnnnnnnnnnnnnnnnnnnnnnnnnnnnnnnnnnnnnnnnnnnnnnnnnnnnnnnnnnnnnnnnnnnnnnnnnnnnnnnnnnnnnnnnnnnnnnnnnnnnnnnnnnnnnnnnnnnnnnnnnnnnnnnnnnnnnnnnnnnnnnnnnnnnnnnnnnnnnnnnnnnnnnnnnnnnnnnnnnnnnnnnnnnnnnnnnnnnnnnnnnnnnnnnnnnnnnnnnnnnnnnnnnnnnnnnnnnnnnnnnnnnnnnnnnnnnnnnnnnnnnnnnnnnnnnnnnnnnnnnnnnnnnnnnnnnnnnnnnnnnnnnnnnnnnnnnnnnnnnnnnnnnnnnnnnnnnnnnnnnnnnnnnnnnnnnnnnnnnnnnnnnnnnnnnnnnnnnnnnnnnnnnnnnnnnnnnnnnnnnnnnnnnnnnnnnnnnnnnnnnnnnnnnnnnnnnnnnnnnnnnnnnnnnnnnnnnnnnnnnnnnnnnnnnnnnnnnnnnnnnnnnnnnnnnnnnnnnnnnnnnnnnnnnnnnnnnnnnnnnnnnnnnnnnnnnnnnnnnnnnnnnnnnnnnnnnnnnnnnnnnnnnnnnnnnnnnnnnnnnnnnnnnnnnnnnnnnnnnnnnnnnnnnnnnnnnnnnnnnnnnnnnnnnnnnnnnnnnnnnnnnnnnnnnnnnnnnnnnnnnnnnnnnnnnnnnnnnnnnnnnnnnnnnnnnnnnnnnnnnnnnnnnnnnnnnnnnnnnnnnnnnnnnnnnnnnnnnnnnnnnnnnnnnnnnnnnnnnnnnnnnnnnnnnnnnnnnnnnnnnnnnnnnnnnnnnnnnnnnnnnnnnnnnnnnnnnnnnnnnnnnnnnnnnnnnnnnnnnnnnnnnnnnnnnnnnnnnnnnnnnnnnnnnnnnnnnnnnnnnnnnnnnnnnnnnnnnnnnnnnnnnnnnnnnnnnnnnnnnnnnnnnnnnnnnnnnnnnnnnnnnnnnnnnnnnnnnnnnnnnnnnnnnnnnnnnnnnnnnnnnnnnnnnnnnnnnnnnnnnnnnnnnnnnnnnnnnnnnnnnnnnnnnnnnnnnnnnnnnnnnnnnnnnnnnnnnnnnnnnnnnnnnnnnnnnnnnnnnnnnnnnnnnnnnnnnnnnnnnnnnnnnnnnnnnnnnnnnnnnnnnnnnnnnnnnnnnnnnnnnnnnnnnnnnnnnnnnnnnnnnnnnnnnnnnnnnnnnnnnnnnnnnnnnnnnnnnnnnnnnnnnnnnnnnnnnnnnnnnnnnnnnnnnnnnnnnnnnnnnnnnnnnnnnnnnnnnnnnnnnnnnnnnnnnnnnnnnnnnnnnnnnnnnnnnnnnnnnnnnnnnnnnnnnnnnnnnnnnnnnnnnnnnnnnnnnnnnnnnnnnnnnnnnnnnnnnnnnnnnnnnnnnnnnnnnnnnnnnnnnnnnnnnnnnnnnnnnnnnnnnnnnnnnnnnnnnnnnnnnnnnnnnnnnnnnnnnnnnnnnnnnnnnnnnnnnnnnnnnnnnnnnnnnnnnnnnnnnnnnnnnnnnnnnnnnnnnnnnnnnnnnnnnnnnnnnnnnnnnnnnnnnnnnnnnnnnnnnnnnnnnnnnnnnnnnnnnnnnnnnnnnnnnnnnnnnnnnnnnnnnnnnnnnnnnnnnnnnnnnnnnnnnnnnnnnnnnnnnnnnnnnnnnnnnnnnnnnnnnnnnnnnnnnnnnnnnnnnnnnnnnnnnnnnnnnnnnnnnnnnnnnnnnnnnnnnnnnnnnnnnnnnnnnnnnnnnnnnnnnnnnnnnnnnnnnnnnnnnnnnnnnnnnnnnnnnnnnnnnnnnnnnnnnnnnnnnnnnnnnnnnnnnnnnnnnnnnnnnnnnnnnnnnnnnnnnnnnnnnnnnnnnnnnnnnnnnnnnnnnnnnnnnnnnnnnnnnnnnnnnnnnnnnnnnnnnnnnnnnnnnnnnnnnnnnnnnnnnnnnnnnnnnnnnnnnnnnnnnnnnnnnnnnnnnnnnnnnnnnnnnnnnnnnnnnnnnnnnnnnnnnnnnnnnnnnnnnnnnnnnnnnnnnnnnnnnnnnnnnnnnnnnnnnnnnnnnnnnnnnnnnnnnnnnnnnnnnnnnnnnnnnnnnnnnnnnnnnnnnnnnnnnnnnnnnnnnnnnnnnnnnnnnnnnnnnnnnnnnnnnnnnnnnnnnnnnnnnnnnnnnnnnnnnnnnnnnnnnnnnnnnnnnnnnnnnnnnnnnnnnnnnnnnnnnnnnnnnnnnnnnnnnnnnnnnnnnnnnnnnnnnnnnnnnnnnnnnnnnnnnnnnnnnnnnnnnnnnnnnnnnnnnnnnnnnnnnnnnnnnnnnnnnnnnnnnnnnnnnnnnnnnnnnnnnnnnnnnnnnnnnnnnnnnnnnnnnnnnnnnnnnnnnnnnnnnnnnnnnnnnnnnnnnnnnnnnnnnnnnnnnnnnnnnnnnnnnnnnnnnnnnnnnnnnnnnnnnnnnnnnnnnnnnnnnnnnnnnnnnnnnnnnnnnnnnnnnnnnnnnnnnnnnnnnnnnnnnnnnnnnnnnnnnnnnnnnnnnnnnnnnnnnnnnnnnnnnnnnnnnnnnnnnnnnnnnnnnnnnnnnnnnnnnnnnnnnnnnnnnnnnnnnnnnnnnnnnnnnnnnnnnnnnnnnnnnnnnnnnnnnnnnnnnnnnnnnnnnnnnnnnnnnnnnnnnnnnnnnnnnnnnnnnnnnnnnnnnnnnnnnnnnnnnnnnnnnnnnnnnnnnnnnnnnnnnnnnnnnnnnnnnnnnnnnnnnnnnnnnnnnnnnnnnnnnnnnnnnnnnnnnnnnnnnnnnnnnnnnnnnnnnnnnnnnnnnnnnnnnnnnnnnnnnnnnnnnnnnnnnnnnnnnnnnnnnnnnnnnnnnnnnnnnnnnnnnnnnnnnnnnnnnnnnnnnnnnnnnnnnnnnnnnnnnnnnnnnnnnnnnnnnnnnnnnnnnnnnnnnnnnnnnnnnnnnnnnnnnnnnnnnnnnnnnnnnnnnnnnnnnnnnnnnnnnnnnnnnnnnnnnnnnnnnnnnnnnnnnnnnnnnnnnnnnnnnnnnnnnnnnnnnnnnnnnnnnnnnnnnnnnnnnnnnnnnnnnnnnnnnnnnnnnnnnnnnnnnnnnnnnnnnnnnnnnnnnnnnnnnnnnnnnnnnnnnnnnnnnnnnnnnnnnnnnnnnnnnnnnnnnnnnnnnnnnnnnnnnnnnnnnnnnnnnnnnnnnnnnnnnnnnnnnnnnnnnnnnnnnnnnnnnnnnnnnnnnnnnnnnnnnnnnnnnnnnnnnnnnnnnnnnnnnnnnnnnnnnnnnnnnnnnnnnnnnnnnnnnnnnnnnnnnnnnnnnnnnnnnnnnnnnnnnnnnnnnnnnnnnnnnnnnnnnnnnnnnnnnnnnnnnnnnnnnnnnnnnnnnnnnnnnnnnnnnnnnnnnnnnnnnnnnnnnnnnnnnnnnnnnnnnnnnnnnnnnnnnnnnnnnnnnnnnnnnnnnnnnnnnnnnnnnnnnnnnnnnnnnnnnnnnnnnnnnnnnnnnnnnnnnnnnnnnnnnnnnnnnnnnnnnnnnnnnnnnnnnnnnnnnnnnnnnnnnnnnnnnnnnnnnnnnnnnnnnnnnnnnnnnnnnnnnnnnnnnnnnnnnnnnnnnnnnnnnnnnnnnnnnnnnnnnnnnnnnnnnnnnnnnnnnnnnnnnnnnnnnnnnnnnnnnnnnnnnnnnnnnnnnnnnnnnnnnnnnnnnnnnnnnnnnnnnnnnnnnnnnnnnnnnnnnnnnnnnnnnnnnnnnnnnnnnnnnnnnnnnnnnnnnnnnnnnnnnnnnnnnnnnnnnnnnnnnnnnnnnnnnnnnnnnnnnnnnnnnnnnnnnnnnnnnnnnnnnnnnnnnnnnnnnnnnnnnnnnnnnnnnnnnnnnnnnnnnnnnnnnnnnnnnnnnnnnnnnnnnnnnnnnnnnnnnnnnnnnnnnnnnnnnnnnnnnnnnnnnnnnnnnnnnnnnnnnnnnnnnnnnnnnnnnnnnnnnnnnnnnnnnnnnnnnnnnnnnnnnnnnnnnnnnnnnnnnnnnnnnnnnnnnnnnnnnnnnnnnnnnnnnnnnnnnnnnnnnnnnnnnnnnnnnnnnnnnnnnnnnnnnnnnnnnnnnnnnnnnnnnnnnnnnnnnnnnnnnnnnnnnnnnnnnnnnnnnnnnnnnnnnnnnnnnnnnnnnnnnnnnnnnnnnnnnnnnnnnnnnnnnnnnnnnnnnnnnnnnnnnnnnnnnnnnnnnnnnnnnnnnnnnnnnnnnnnnnnnnnnnnnnnnnnnnnnnnnnnnnnnnnnnnnnnnnnnnnnnnnnnnnnnnnnnnnnnnnnnnnnnnnnnnnnnnnnnnnnnnnnnnnnnnnnnnnnnnnnnnnnnnnnnnnnnnnnnnnnnnnnnnnnnnnnnnnnnnnnnnnnnnnnnnnnnnnnnnnnnnnnnnnnnnnnnnnnnnnnnnnnnnnnnnnnnnnnnnnnnnnnnnnnnnnnnnnnnnnnnnnnnnnnnnnnnnnnnnnnnnnnnnnnnnnnnnnnnnnnnnnnnnnnnnnnnnnnnnnnnnnnnnnnnnnnnnnnnnnnnnnnnnnnnnnnnnnnnnnnnnnnnnnnnnnnnnnnnnnnnnnnnnnnnnnnnnnnnnnnnnnnnnnnnnnnnnnnnnnnnnnnnnnnnnnnnnnnnnnnnnnnnnnnnnnnnnnnnnnnnnnnnnnnnnnnnnnnnnnnnnnnnnnnnnnnnnnnnnnnnnnnnnnnnnnnnnnnnnnnnnnnnnnnnnnnnnnnnnnnnnnnnnnnnnnnnnnnnnnnnnnnnnnnnnnnnnnnnnnnnnnnnnnnnnnnnnnnnnnnnnnnnnnnnnnnnnnnnnnnnnnnnnnnnnnnnnnnnnnnnnnnnnnnnnnnnnnnnnnnnnnnnnnnnnnnnnnnnnnnnnnnnnnnnnnnnnnnnnnnnnnnnnnnnnnnnnnnnnnnnnnnnnnnnnnnnnnnnnnnnnnnnnnnnnnnnnnnnnnnnnnnnnnnnnnnnnnnnnnnnnnnnnnnnnnnnnnnnnnnnnnnnnnnnnnnnnnnnnnnnnnnnnnnnnnnnnnnnnnnnnnnnnnnnnnnnnnnnnnnnnnnnnnnnnnnnnnnnnnnnnnnnnnnnnnnnnnnnnnnnnnnnnnnnnnnnnnnnnnnnnnnnnnnnnnnnnnnnnnnnnnnnnnnnnnnnnnnnnnnnnnnnnnnnnnnnnnnnnnnnnnnnnnnnnnnnnnnnnnnnnnnnnnnnnnnnnnnnnnnnnnnnnnnnnnnnnnnnnnnnnnnnnnnnnnnnnnnnnnnnnnnnnnnnnnnnnnnnnnnnnnnnnnnnnnnnnnnnnnnnnnnnnnnnnnnnnnnnnnnnnnnnnnnnnnnnnnnnnnnnnnnnnnnnnnnnnnnnnnnnnnnnnnnnnnnnnnnnnnnnnnnnnnnnnnnnnnnnnnnnnnnnnnnnnnnnnnnnnnnnnnnnnnnnnnnnnnnnnnnnnnnnnnnnnnnnnnnnnnnnnnnnnnnnnnnnnnnnnnnnnnnnnnnnnnnnnnnnnnnnnnnnnnnnnnnnnnnnnnnnnnnnnnnnnnnnnnnnnnnnnnnnnnnnnnnnnnnnnnnnnnnnnnnnnnnnnnnnnnnnnnnnnnnnnnnnnnnnnnnnnnnnnnnnnnnnnnnnnnnnnnnnnnnnnnnnnnnnnnnnnnnnnnnnnnnnnnnnnnnnnnnnnnnnnnnnnnnnnnnnnnnnnnnnnnnnnnnnnnnnnnnnnnnnnnnnnnnnnnnnnnnnnnnnnnnnnnnnnnnnnnnnnnnnnnnnnnnnnnnnnnnnnnnnnnnnnnnnnnnnnnnnnnnnnnnnnnnnnnnnnnnnnnnnnnnnnnnnnnnnnnnnnnnnnnnnnnnnnnnnnnnnnnnnnnnnnnnnnnnnnnnnnnnnnnnnnnnnnnnnnnnnnnnnnnnnnnnnnnnnnnnnnnnnnnnnnnnnnnnnnnnnnnnnnnnnnnnnnnnnnnnnnnnnnnnnnnnnnnnnnnnnnnnnnnnnnnnnnnnnnnnnnnnnnnnnnnnnnnnnnnnnnnnnnnnnnnnnnnnnnnnnnnnnnnnnnnnnnnnnnnnnnnnnnnnnnnnnnnnnnnnnnnnnnnnnnnnnnnnnnnnnnnnnnnnnnnnnnnnnnnnnnnnnnnnnnnnnnnnnnnnnnnnnnnnnnnnnnnnnnnnnnnnnnnnnnnnnnnnnnnnnnnnnnnnnnnnnnnnnnnnnnnnnnnnnnnnnnnnnnnnnnnnnnnnnnnnnnnnnnnnnnnnnnnnnnnnnnnnnnnnnnnnnnnnnnnnnnnnnnnnnnnnnnnnnnnnnnnnnnnnnnnnnnnnnnnnnnnnnnnnnnnnnnnnnnnnnnnnnnnnnnnnnnnnnnnnnnnnnnnnnnnnnnnnnnnnnnnnnnnnnnnnnnnnnnnnnnnnnnnnnnnnnnnnnnnnnnnnnnnnnnnnnnnnnnnnnnnnnnnnnnnnnnnnnnnnnnnnnnnnnnnnnnnnnnnnnnnnnnnnnnnnnnnnnnnnnnnnnnnnnnnnnnnnnnnnnnnnnnnnnnnnnnnnnnnnnnnnnnnnnnnnnnnnnnnnnnnnnnnnnnnnnnnnnnnnnnnnnnnnnnnnnnnnnnnnnnnnnnnnnnnnnnnnnnnnnnnnnnnnnnnnnnnnnnnnnnnnnnnnnnnnnnnnnnnnnnnnnnnnnnnnnnnnnnnnnnnnnnnnnnnnnnnnnnnnnnnnnnnnnnnnnnnnnnnnnnnnnnnnnnnnnnnnnnnnnnnnnnnnnnnnnnnnnnnnnnnnnnnnnnnnnnnnnnnnnnnnnnnnnnnnnnnnnnnnnnnnnnnnnnnnnnnnnnnnnnnnnnnnnnnnnnnnnnnnnnnnnnnnnnnnnnnnnnnnnnnnnnnnnnnnnnnnnnnnnnnnnnnnnnnnnnnnnnnnnnnnnnnnnnnnnnnnnnnnnnnnnnnnnnnnnnnnnnnnnnnnnnnnnnnnnnnnnnnnnnnnnnnnnnnnnnnnnnnnnnnnnnnnnnnnnnnnnnnnnnnnnnnnnnnnnnnnnnnnnnnnnnnnnnnnnnnnnnnnnnnnnnnnnnnnnnnnnnnnnnnnnnnnnnnnnnnnnnnnnnnnnnnnnnnnnnnnnnnnnnnnnnnnnnnnnnnnnnnnnnnnnnnnnnnnnnnnnnnnnnnnnnnnnnnnnnnnnnnnnnnnnnnnnnnnnnnnnnnnnnnnnnnnnnnnnnnnnnnnnnnnnnnnnnnnnnnnnnnnnnnnnnnnnnnnnnnnnnnnnnnnnnnnnnnnnnnnnnnnnnnnnnnnnnnnnnnnnnnnnnnnnnnnnnnnnnnnnnnnnnnnnnnnnnnnnnnnnnnnnnnnnnnnnnnnnnnnnnnnnnnnnnnnnnnnnnnnnnnnnnnnnnnnnnnnnnnnnnnnnnnnnnnnnnnnnnnnnnnnnnnnnnnnnnnnnnnnnnnnnnnnnnnnnnnnnnnnnnnnnnnnnnnnnnnnnnnnnnnnnnnnnnnnnnnnnnnnnnnnnnnnnnnnnnnnnnnnnnnnnnnnnnnnnnnnnnnnnnnnnnnnnnnnnnnnnnnnnnnnnnnnnnnnnnnnnnnnnnnnnnnnnnnnnnnnnnnnnnnnnnnnnnnnnnnnnnnnnnnnnnnnnnnnnnnnnnnnnnnnnnnnnnnnnnnnnnnnnnnnnnnnnnnnnnnnnnnnnnnnnnnnnnnnnnnnnnnnnnnnnnnnnnnnnnnnnnnnnnnnnnnnnnnnnnnnnnnnnnnnnnnnnnnnnnnnnnnnnnnnnnnnnnnnnnnnnnnnnnnnnnnnnnnnnnnnnnnnnnnnnnnnnnnnnnnnnnnnnnnnnnnnnnnnnnnnnnnnnnnnnnnnnnnnnnnnnnnnnnnnnnnnnnnnnnnnnnnnnnnnnnnnnnnnnnnnnnnnnnnnnnnnnnnnnnnnnnnnnnnnnnnnnnnnnnnnnnnnnnnnnnnnnnnnnnnnnnnnnnnnnnnnnnnnnnnnnnnnnnnnnnnnnnnnnnnnnnnnnnnnnnnnnnnnnnnnnnnnnnnnnnnnnnnnnnnnnnnnnnnnnnnnnnnnnnnnnnnnnnnnnnnnnnnnnnnnnnnnnnnnnnnnnnnnnnnnnnnnnnnnnnnnnnnnnnnnnnnnnnnnnnnnnnnnnnnnnnnnnnnnnnnnnnnnnnnnnnnnnnnnnnnnnnnnnnnnnnnnnnnnnnnnnnnnnnnnnnnnnnnnnnnnnnnnnnnnnnnnnnnnnnnnnnnnnnnnnnnnnnnnnnnnnnnnnnnnnnnnnnnnnnnnnnnnnnnnnnnnnnnnnnnnnnnnnnnnnnnnnnnnnnnnnnnnnnnnnnnnnnnnnnnnnnnnnnnnnnnnnnnnnnnnnnnnnnnnnnnnnntctatccctttatccccaagtacatcatcgccaggcggaccgttggtgcacaccacttgtaaccgcgccgtgttgtgtgacccgcttcgttcaacttatgggcgatctccgcgtagctcaatcccgcgcttctcagttccttgaatgtcggtgcaaggtcctcatacgctcgacgtgccaactccggtatcacctgacgcgctacctttcgacccttcgctcccccggcaagccgctgcgcttcgcgtccagaccaatgacccggacggtgtgagccgagctttgtccctcgacgtttcgccgctgcgagcgcttccttaatccgcgtcgaaattctctgccgttcgtctcgtgctacgaccgccagaatcccaaccgtcatctcgttcacgtcaggataatcaaccgccacgaacctcagcccgtcattcatcaagtgaaaaagaaactccgggtcgcgtgtcaaccgatccagtttcgctatcgcaaggcaaccgcctaaccgtttggtatgcgcaaccgctttgagaagctcaggtcggttctcgtgtcgtctcccagattcgacctcggtgtattcagccaccactacgccgcccttcgacttgacgtactcctggaccgcatgacgctgcgcctccagtcccaaaccagagcgtccttgccgcgccgtactcacccggtaatacgcgacaaacttgccgtcaccgtttcgcgcctgtccctttctaaccatgttccgatccccctcctttccggtctcagtttcgtcttacatcgtcagtgtagcatatctctcggctaaagtcaagagaaattttacagacaccatagacccaacgatttgtcaagcactttcgcacaattacggtattgctttctaaagaacaagcaaccctttctgtttgcgcttgcggtactttcagagagggaatctcgtccatccgaactatcgaggtatctacgtcagcgttttgtcagctgtagtgttcgacttcagcagcgacaaaggggagaacttccctgtgcttgcaggatttaagccgcgcaacatggagcttgcgatgtacaccatcaaacatctgcgaaggaacggcgtcctcgaagcacgtccctccgagccagcctgtctgatgaggcgattccgagaagttgacagaactggggatgattcaagcggagcagtgcagcgcgcttgacacgcaacccttgtgggggtatcattgtgttgcgaggggagcggcgcgaaggctcggtcgagaatatcctatactaccgtgacaatctagcggtgctccgtcgacatatgtcagacgaggcgggagatcttatgaacctcgacccacctttcaacagcaatgcgacatacaaccccaggccgtctgcccacgccgacggactcaaggtcatcgcgcgcgagcacccattggctttgctcaaaccccacaagtcgcagttcgatacgcgaagtttcacgaacaaacgcggaggaggaagccatgggcgagaatcccaagaactataacctgctcgtagagcaatggatccccgttctatggaccgatgggaagcccggtcgcgtgggcatcagggaggcgctcacgcaagcaggccggattcgacaaatcgcggcgaccaatcccatggaccgcgtggcgattctgcgtttccttctcgcgttgctatactggtgcaaggggagtccaccagacaccacaaaagccagctctggcgacccgttccctgccgattggttctcgaaactcaatgacaacaaagattgcttcaatctactgggtgatggaaagcggttctatcaggatcgtgatgcacgaagaccgcgacctgctacagatctgatccaagagatccctacaggcaacaacttctggcatttcagacattcgacggacaagaaagacgggctttgccccgcatgctgcgccctggggctgctgcggttgccgctgttctccgtgagtggcctgcctgacctgaggtctggaatcaacggcgtcccaccagtgtatcttctgccatggggcatgtcgctgctggataccctttgcgccagctgggtgacacgtgtgcaacttggcgacccagcatggcttcagccgaccattcgcccaaccccgaatcaagtcgtgccactgcttaccggcttgacgctactgtcaaggcgggtctggttgcatgagccgtcctcgccgccgggcatgtgtaacggatgtggagcgaagcaacacgctctcatccggacatgcgaattcaagacggctggcaagcaggagaatgacttgtgggatgatccccatgttgtctacttggacaagacaccacgaaaagccgcgagagcacctgacctgacagcggccggcaagttcaggatggatcgcccgtggccaaatctctttgctcatgtcgttgaaacgcgcaagttcggaccgggagaaaaaccgacatcgcttcttgtcgtcgggtttgccactgaccaggcaaagaacattgacgtgtgggagcgaaccattgccgtgccgccgggaacatcaatccacaatatggcggcatccttgctacggcaatggcgggagaagggctcgctattggagaaacggatagggcgatcggaggtcgagggtgcggccactatcgccgccattcgcccccatgtcgaaggcagagtctccgcgaaggcgggcgaactgattgccggtactgatcaagcatggcagcgcgcggcgcaggaataccgacccatgatggaggtgatcgccaaatcggtttctccgggctttacctcggaggcggttcggcggcgacaacaaattgccagcgtagcgcctgacatgcggccaaaaacagatacggccgagaaatccgaccggaagaagggagggcacaggtgacacccacggagcagtacgttgacgtcttgacgcagttgaagaccggtgaacttgggctgctgcgtactcatgccggacaggggcttgatgaatcggtcggcggatttgatctgttctccggtttgtggtggccgctacgacggaagaacgagcgggcgccccgccgcaaggtggcgtggctgatcgccaagctgtatggctcctgtccaattgcacagtcgcccggagacacgctcgcccgccaactagggcgctgtcagccaaacgacgacaccgcgagaaagcgattccggaaaaggttcgaccggatgctcatgctgccgctggacaagatcgagccggcgttgcgctgggcgcttgacgaggtcgcctcaagcagccggaaactcgactgggtgaaactaacggatcatctttcaatttgggaacgtgaagccacgcggctcgagtgggcggaggaatttctgggaaccgatgaaaggggacagtcatgttgatcgaaattcacgtcattcaaaaccacagtccggccaatctgaaccgcgacgacctgggcgcacccaagacctgttacttcggcggcgtcctgcgctcgcgcatctccagccagtgcctcaagcgcagcatccgcacgagcaaggagtttaggaaactgctcggcgggattcgcaccaggcagttggcgaaattgatcgccgagaaggtcacgggcaagtccgacgtaaagaaacgcgcggagagaattctcaaagcgtgtggattcgagcctaagagcgcgaccaagcaaaacacagacgacaaggctctcaaagactccgacaagagcaagatgctcgtctatacaaccaacgaggccattgaggagatggccgcacttttgtcgaacgacgatggaaagaccgacaaacaactggcaagggagttcgctaagctaatcgccgagcgcacggcggtgccggacatggcgctgtcggggcgcatgttggaacccgacaaggccgcgaaggatgtctgggagagcctcaacacgaccgtggatgcctctttgcaagtggcgcacgcgatttccacccacgaggcccgcccagaagtggactactatgtcgccaaagatgacgttcccggcgacgacgcgggagcgggatacgtggacgaagccatgttcgcctcggcgtgcttttacaagtacttctcgatccactgggaaacgttggtcgaaaacctgaagggctatggagagaatcacgaaaagctcgccgcgcacacactcggcgcgttcattcgtggggcggcgttgaccaatcccaccggcaagcagaacagctttgccgcgcacaatccccccgatggaatgctgatcgagatcaagaacaccccgatcggctacgccaacgcctttgccaaaccggcagcccaaggtgaacgcgacatcatctcgcagagcatcgcgcagttggcgcaatacgttcatgatctggacaccggatacggcaagccgacgcaacggttctggttctcgcccaatttgcgttaccacttgaacgtcgtcgagaacaagcaggagatcgcgcttgccgagaacaacatcaagtcactggaagagttgatccccgccgtgattaaggccatcggctatgactgggaggaagttcagaagtccatcgtgaattctgaggtggcctcatgagcggcaacaccctctttcttcgcctcgaaggccctttgcaggcgtggggcgaccagcaatcaaagttcgttatccgacggacggccgaggccccgaccaaatccggagtgatcgggatgctgtgcgccgcattgggcgtttcccgtccgcaggccggcggggaatggcttccgaagctcggtgccctccgcatgggcgtccgcattgacgcgccgggggtccggtggtgggactatcacacggtcggcgccggaatggacatgcgcatcgcggaagccgagggaaagaccaagcccggcgcgatgctcactcggcgcgagtacctttgcgacgcctctttcctcgtggcactgcaaggcgaaccggctctcattgccgaactggatgccgcagtgaaggcgccccggtggaccctgtacctcggcagaaagtcctgcccgccatcccgcccgctgctggagcaaccgggcggcgttttttccgatttggtttcagcggttgtatcgatcccctggcgaccgcggctcaaaggagagccttcgcccaaaaccgtggattgcctgctcgactgggagccgacgccccagcagccccaagcccccgacgatgcactgatctggtacgacgtgccgctgacgttcgagcctccggcgcatcgcccccggtttgtcatcggtcggcaattgcgtgtgggcacgggcggcgaagtcagcatcgcggacgagcccgcccagaaccttacgccgcgccctcctcgaccgagggccgactatcgcaacaccgagtacgaaaaacgtcggcaagagcggctcgaccgcgaccatcacctgtgcgtgttctgcaagtctcgcgcgacgaccgttcagcatgtcacttatcgccacgccggcggagatgagcgcattgacgaactgcgctcgctctgccgcctgtgccacgacgccgtgacgatgatcgaatacggcctgggcatgggcctggaccgcatcaacccggcagaggaacgctggcgggagttgatcattgagaaacgccgggaaatcatccagttccgttcacttgagacgcgccgccgtaagcttgcgcccgaggaggtcgaatagacatgtacctatcctggctcttgattgacgtgggtggaaaccccgatcggccccgccccggacggctgtggctccgcaacctctaccatgtccatcagcgcctgtgcatggcgttcccgtcggcgtccaggatggccgatgacccggattttctcaaacccttcaacccggaagactttggagccaaccaagtccatgtcgctcgggcgaccgacgccgggttcctgtttcgcatagacccgcagcccggtgggcgggtcgcgattctcgtacaatctgccgtcaagcccgactgggactacgcctttcacaacgccgggtaccttctggcggctcctccggaattgaagtcattcgagccgcgcttcgcaaagggacagcaccttcgattccgtctcgtggcaaatccgacaaagaagattgataccctccagaaagaggctcgacagagtcacaccaaaagtgaactacaggccatgaagggacgacacggaaagcgcgtccctgtgccgaccgacgaactcgttgagtggctcgctcgccgggcgggcaaggcggggttctccatcgacaagcggtccattgccgttcagccgagctacatctatgtgaacaaaacacgcgacgagaagggacagcgtctgcgctccgcccgttacgacggggccctcacgattaccgaccctgctcgttttcaggaaacccttgtccgtgggctcgggcccggcaaagccttcggtttcggccttctctctgtagcgccctgccagcgttcactcagggaagagccgacatgagaactcaagatctgcacgttctgcccaagttccgcgacgggtggagctacctctacgtggaacactgtcggatcgaccaggacgctcgggccgttgcaattcatgacgccgcgggcaaggtgcctgtcccgtgcgccaatctggctctcttgatgttgggacccggcgtctcgatcacccatgctgcggtctcggtcttggcggaccatgggtgccttgtagcatggtgcggggaagagggggtccggttctacgcggtgggcatgggcgagacgcgcagcgcatccaacctcctgcaccaggcgcgaatgtgggcgtgcgaggaactccgcatacaggttgtatgccgtctctaccagttgcggttttccgaaaagctcgatccggcgttgaccctccggcaaatccgcgggatggaggggatccgcgttcgcgaggcctacgccaaggccgctcgggaaaccggcgtgccctgggcgggccgaggctatcgtccagacaagtggagcaacgcggacccggtgaaccgagcgttgtcgaccgccaactcgtgcctgtacggcatctgtcatgccggggtcgtgtcaggaggcttctcttcggcgctcgggtttatccataccgggaagatgctgtcgttcgtatatgatgtcgccgatctctacaaaacagaggtcacgatcccggcggcgtttcgcgcggtcgccgaagcgaagggagaactggagcgacgcgtgcgcctggcttgccgggacatgtttgtctcaacgcggcttctgcaaaggatcattccggatatccagatggcgctggcgctcccagtgcggggcacggagggcgacactgaacagttcgaccgggaatccgccgtcccgggctcgttgtgggacccgcaggagggacaggtgcaaggcgggcgcatccatccgctggaagtggatgaaacggaggccaacgatggtagttctgatccttgagcgtgtgccgccgggattgcgaggcgaattgacacgatggttcctggaaccgaaggcaggcgtgttcgtaggacgggtttcggccatggtgcgggaccaactctgggagaaggcgtgcgggcatgcaagggaaggcggctgtgtgatgatctatacgagcggcaccgaacagggatttcagatacgcagttgggggcgcaccgcgcggtcgatcgaagacttcgaagggctttttctcgtccggatgccctaagagcgcggtttctttcagtattgtccccacgcacgtgggggtgaaccgaaagcgggcgaggaggaggacgaatgaggcgaattgtccccacgcacgtgggggtgaaccgaaggcggaggactgcataagccgcctgcgactattgtccccacgcacgtgggggtgaaccgtgtagaggatggaataacactgccagaagagcattgtccccacgcacgtgggggtgaaccgaaatc

SEQ ID NO: 1093 - DNA, 104253 bp, Artificial Sequence
  Synthetic Oligonucleotide
  misc_feature (1)..(96294): n is a, c, g, or t
nnnnnnnnnnnnnnnnnnnnnnnnnnnnnnnnnnnnnnnnnnnnnnnnnnnnnnnnnnnnnnnnnnnnnnnnnnnnnnnnnnnnnnnnnnnnnnnnnnnnnnnnnnnnnnnnnnnnnnnnnnnnnnnnnnnnnnnnnnnnnnnnnnnnnnnnnnnnnnnnnnnnnnnnnnnnnnnnnnnnnnnnnnnnnnnnnnnnnnnnnnnnnnnnnnnnnnnnnnnnnnnnnnnnnnnnnnnnnnnnnnnnnnnnnnnnnnnnnnnnnnnnnnnnnnnnnnnnnnnnnnnnnnnnnnnnnnnnnnnnnnnnnnnnnnnnnnnnnnnnnnnnnnnnnnnnnnnnnnnnnnnnnnnnnnnnnnnnnnnnnnnnnnnnnnnnnnnnnnnnnnnnnnnnnnnnnnnnnnnnnnnnnnnnnnnnnnnnnnnnnnnnnnnnnnnnnnnnnnnnnnnnnnnnnnnnnnnnnnnnnnnnnnnnnnnnnnnnnnnnnnnnnnnnnnnnnnnnnnnnnnnnnnnnnnnnnnnnnnnnnnnnnnnnnnnnnnnnnnnnnnnnnnnnnnnnnnnnnnnnnnnnnnnnnnnnnnnnnnnnnnnnnnnnnnnnnnnnnnnnnnnnnnnnnnnnnnnnnnnnnnnnnnnnnnnnnnnnnnnnnnnnnnnnnnnnnnnnnnnnnnnnnnnnnnnnnnnnnnnnnnnnnnnnnnnnnnnnnnnnnnnnnnnnnnnnnnnnnnnnnnnnnnnnnnnnnnnnnnnnnnnnnnnnnnnnnnnnnnnnnnnnnnnnnnnnnnnnnnnnnnnnnnnnnnnnnnnnnnnnnnnnnnnnnnnnnnnnnnnnnnnnnnnnnnnnnnnnnnnnnnnnnnnnnnnnnnnnnnnnnnnnnnnnnnnnnnnnnnnnnnnnnnnnnnnnnnnnnnnnnnnnnnnnnnnnnnnnnnnnnnnnnnnnnnnnnnnnnnnnnnnnnnnnnnnnnnnnnnnnnnnnnnnnnnnnnnnnnnnnnnnnnnnnnnnnnnnnnnnnnnnnnnnnnnnnnnnnnnnnnnnnnnnnnnnnnnnnnnnnnnnnnnnnnnnnnnnnnnnnnnnnnnnnnnnnnnnnnnnnnnnnnnnnnnnnnnnnnnnnnnnnnnnnnnnnnnnnnnnnnnnnnnnnnnnnnnnnnnnnnnnnnnnnnnnnnnnnnnnnnnnnnnnnnnnnnnnnnnnnnnnnnnnnnnnnnnnnnnnnnnnnnnnnnnnnnnnnnnnnnnnnnnnnnnnnnnnnnnnnnnnnnnnnnnnnnnnnnnnnnnnnnnnnnnnnnnnnnnnnnnnnnnnnnnnnnnnnnnnnnnnnnnnnnnnnnnnnnnnnnnnnnnnnnnnnnnnnnnnnnnnnnnnnnnnnnnnnnnnnnnnnnnnnnnnnnnnnnnnnnnnnnnnnnnnnnnnnnnnnnnnnnnnnnnnnnnnnnnnnnnnnnnnnnnnnnnnnnnnnnnnnnnnnnnnnnnnnnnnnnnnnnnnnnnnnnnnnnnnnnnnnnnnnnnnnnnnnnnnnnnnnnnnnnnnnnnnnnnnnnnnnnnnnnnnnnnnnnnnnnnnnnnnnnnnnnnnnnnnnnnnnnnnnnnnnnnnnnnnnnnnnnnnnnnnnnnnnnnnnnnnnnnnnnnnnnnnnnnnnnnnnnnnnnnnnnnnnnnnnnnnnnnnnnnnnnnnnnnnnnnnnnnnnnnnnnnnnnnnnnnnnnnnnnnnnnnnnnnnnnnnnnnnnnnnnnnnnnnnnnnnnnnnnnnnnnnnnnnnnnnnnnnnnnnnnnnnnnnnnnnnnnnnnnnnnnnnnnnnnnnnnnnnnnnnnnnnnnnnnnnnnnnnnnnnnnnnnnnnnnnnnnnnnnnnnnnnnnnnnnnnnnnnnnnnnnnnnnnnnnnnnnnnnnnnnnnnnnnnnnnnnnnnnnnnnnnnnnnnnnnnnnnnnnnnnnnnnnnnnnnnnnnnnnnnnnnnnnnnnnnnnnnnnnnnnnnnnnnnnnnnnnnnnnnnnnnnnnnnnnnnnnnnnnnnnnnnnnnnnnnnnnnnnnnnnnnnnnnnnnnnnnnnnnnnnnnnnnnnnnnnnnnnnnnnnnnnnnnnnnnnnnnnnnnnnnnnnnnnnnnnnnnnnnnnnnnnnnnnnnnnnnnnnnnnnnnnnnnnnnnnnnnnnnnnnnnnnnnnnnnnnnnnnnnnnnnnnnnnnnnnnnnnnnnnnnnnnnnnnnnnnnnnnnnnnnnnnnnnnnnnnnnnnnnnnnnnnnnnnnnnnnnnnnnnnnnnnnnnnnnnnnnnnnnnnnnnnnnnnnnnnnnnnnnnnnnnnnnnnnnnnnnnnnnnnnnnnnnnnnnnnnnnnnnnnnnnnnnnnnnnnnnnnnnnnnnnnnnnnnnnnnnnnnnnnnnnnnnnnnnnnnnnnnnnnnnnnnnnnnnnnnnnnnnnnnnnnnnnnnnnnnnnnnnnnnnnnnnnnnnnnnnnnnnnnnnnnnnnnnnnnnnnnnnnnnnnnnnnnnnnnnnnnnnnnnnnnnnnnnnnnnnnnnnnnnnnnnnnnnnnnnnnnnnnnnnnnnnnnnnnnnnnnnnnnnnnnnnnnnnnnnnnnnnnnnnnnnnnnnnnnnnnnnnnnnnnnnnnnnnnnnnnnnnnnnnnnnnnnnnnnnnnnnnnnnnnnnnnnnnnnnnnnnnnnnnnnnnnnnnnnnnnnnnnnnnnnnnnnnnnnnnnnnnnnnnnnnnnnnnnnnnnnnnnnnnnnnnnnnnnnnnnnnnnnnnnnnnnnnnnnnnnnnnnnnnnnnnnnnnnnnnnnnnnnnnnnnnnnnnnnnnnnnnnnnnnnnnnnnnnnnnnnnnnnnnnnnnnnnnnnnnnnnnnnnnnnnnnnnnnnnnnnnnnnnnnnnnnnnnnnnnnnnnnnnnnnnnnnnnnnnnnnnnnnnnnnnnnnnnnnnnnnnnnnnnnnnnnnnnnnnnnnnnnnnnnnnnnnnnnnnnnnnnnnnnnnnnnnnnnnnnnnnnnnnnnnnnnnnnnnnnnnnnnnnnnnnnnnnnnnnnnnnnnnnnnnnnnnnnnnnnnnnnnnnnnnnnnnnnnnnnnnnnnnnnnnnnnnnnnnnnnnnnnnnnnnnnnnnnnnnnnnnnnnnnnnnnnnnnnnnnnnnnnnnnnnnnnnnnnnnnnnnnnnnnnnnnnnnnnnnnnnnnnnnnnnnnnnnnnnnnnnnnnnnnnnnnnnnnnnnnnnnnnnnnnnnnnnnnnnnnnnnnnnnnnnnnnnnnnnnnnnnnnnnnnnnnnnnnnnnnnnnnnnnnnnnnnnnnnnnnnnnnnnnnnnnnnnnnnnnnnnnnnnnnnnnnnnnnnnnnnnnnnnnnnnnnnnnnnnnnnnnnnnnnnnnnnnnnnnnnnnnnnnnnnnnnnnnnnnnnnnnnnnnnnnnnnnnnnnnnnnnnnnnnnnnnnnnnnnnnnnnnnnnnnnnnnnnnnnnnnnnnnnnnnnnnnnnnnnnnnnnnnnnnnnnnnnnnnnnnnnnnnnnnnnnnnnnnnnnnnnnnnnnnnnnnnnnnnnnnnnnnnnnnnnnnnnnnnnnnnnnnnnnnnnnnnnnnnnnnnnnnnnnnnnnnnnnnnnnnnnnnnnnnnnnnnnnnnnnnnnnnnnnnnnnnnnnnnnnnnnnnnnnnnnnnnnnnnnnnnnnnnnnnnnnnnnnnnnnnnnnnnnnnnnnnnnnnnnnnnnnnnnnnnnnnnnnnnnnnnnnnnnnnnnnnnnnnnnnnnnnnnnnnnnnnnnnnnnnnnnnnnnnnnnnnnnnnnnnnnnnnnnnnnnnnnnnnnnnnnnnnnnnnnnnnnnnnnnnnnnnnnnnnnnnnnnnnnnnnnnnnnnnnnnnnnnnnnnnnnnnnnnnnnnnnnnnnnnnnnnnnnnnnnnnnnnnnnnnnnnnnnnnnnnnnnnnnnnnnnnnnnnnnnnnnnnnnnnnnnnnnnnnnnnnnnnnnnnnnnnnnnnnnnnnnnnnnnnnnnnnnnnnnnnnnnnnnnnnnnnnnnnnnnnnnnnnnnnnnnnnnnnnnnnnnnnnnnnnnnnnnnnnnnnnnnnnnnnnnnnnnnnnnnnnnnnnnnnnnnnnnnnnnnnnnnnnnnnnnnnnnnnnnnnnnnnnnnnnnnnnnnnnnnnnnnnnnnnnnnnnnnnnnnnnnnnnnnnnnnnnnnnnnnnnnnnnnnnnnnnnnnnnnnnnnnnnnnnnnnnnnnnnnnnnnnnnnnnnnnnnnnnnnnnnnnnnnnnnnnnnnnnnnnnnnnnnnnnnnnnnnnnnnnnnnnnnnnnnnnnnnnnnnnnnnnnnnnnnnnnnnnnnnnnnnnnnnnnnnnnnnnnnnnnnnnnnnnnnnnnnnnnnnnnnnnnnnnnnnnnnnnnnnnnnnnnnnnnnnnnnnnnnnnnnnnnnnnnnnnnnnnnnnnnnnnnnnnnnnnnnnnnnnnnnnnnnnnnnnnnnnnnnnnnnnnnnnnnnnnnnnnnnnnnnnnnnnnnnnnnnnnnnnnnnnnnnnnnnnnnnnnnnnnnnnnnnnnnnnnnnnnnnnnnnnnnnnnnnnnnnnnnnnnnnnnnnnnnnnnnnnnnnnnnnnnnnnnnnnnnnnnnnnnnnnnnnnnnnnnnnnnnnnnnnnnnnnnnnnnnnnnnnnnnnnnnnnnnnnnnnnnnnnnnnnnnnnnnnnnnnnnnnnnnnnnnnnnnnnnnnnnnnnnnnnnnnnnnnnnnnnnnnnnnnnnnnnnnnnnnnnnnnnnnnnnnnnnnnnnnnnnnnnnnnnnnnnnnnnnnnnnnnnnnnnnnnnnnnnnnnnnnnnnnnnnnnnnnnnnnnnnnnnnnnnnnnnnnnnnnnnnnnnnnnnnnnnnnnnnnnnnnnnnnnnnnnnnnnnnnnnnnnnnnnnnnnnnnnnnnnnnnnnnnnnnnnnnnnnnnnnnnnnnnnnnnnnnnnnnnnnnnnnnnnnnnnnnnnnnnnnnnnnnnnnnnnnnnnnnnnnnnnnnnnnnnnnnnnnnnnnnnnnnnnnnnnnnnnnnnnnnnnnnnnnnnnnnnnnnnnnnnnnnnnnnnnnnnnnnnnnnnnnnnnnnnnnnnnnnnnnnnnnnnnnnnnnnnnnnnnnnnnnnnnnnnnnnnnnnnnnnnnnnnnnnnnnnnnnnnnnnnnnnnnnnnnnnnnnnnnnnnnnnnnnnnnnnnnnnnnnnnnnnnnnnnnnnnnnnnnnnnnnnnnnnnnnnnnnnnnnnnnnnnnnnnnnnnnnnnnnnnnnnnnnnnnnnnnnnnnnnnnnnnnnnnnnnnnnnnnnnnnnnnnnnnnnnnnnnnnnnnnnnnnnnnnnnnnnnnnnnnnnnnnnnnnnnnnnnnnnnnnnnnnnnnnnnnnnnnnnnnnnnnnnnnnnnnnnnnnnnnnnnnnnnnnnnnnnnnnnnnnnnnnnnnnnnnnnnnnnnnnnnnnnnnnnnnnnnnnnnnnnnnnnnnnnnnnnnnnnnnnnnnnnnnnnnnnnnnnnnnnnnnnnnnnnnnnnnnnnnnnnnnnnnnnnnnnnnnnnnnnnnnnnnnnnnnnnnnnnnnnnnnnnnnnnnnnnnnnnnnnnnnnnnnnnnnnnnnnnnnnnnnnnnnnnnnnnnnnnnnnnnnnnnnnnnnnnnnnnnnnnnnnnnnnnnnnnnnnnnnnnnnnnnnnnnnnnnnnnnnnnnnnnnnnnnnnnnnnnnnnnnnnnnnnnnnnnnnnnnnnnnnnnnnnnnnnnnnnnnnnnnnnnnnnnnnnnnnnnnnnnnnnnnnnnnnnnnnnnnnnnnnnnnnnnnnnnnnnnnnnnnnnnnnnnnnnnnnnnnnnnnnnnnnnnnnnnnnnnnnnnnnnnnnnnnnnnnnnnnnnnnnnnnnnnnnnnnnnnnnnnnnnnnnnnnnnnnnnnnnnnnnnnnnnnnnnnnnnnnnnnnnnnnnnnnnnnnnnnnnnnnnnnnnnnnnnnnnnnnnnnnnnnnnnnnnnnnnnnnnnnnnnnnnnnnnnnnnnnnnnnnnnnnnnnnnnnnnnnnnnnnnnnnnnnnnnnnnnnnnnnnnnnnnnnnnnnnnnnnnnnnnnnnnnnnnnnnnnnnnnnnnnnnnnnnnnnnnnnnnnnnnnnnnnnnnnnnnnnnnnnnnnnnnnnnnnnnnnnnnnnnnnnnnnnnnnnnnnnnnnnnnnnnnnnnnnnnnnnnnnnnnnnnnnnnnnnnnnnnnnnnnnnnnnnnnnnnnnnnnnnnnnnnnnnnnnnnnnnnnnnnnnnnnnnnnnnnnnnnnnnnnnnnnnnnnnnnnnnnnnnnnnnnnnnnnnnnnnnnnnnnnnnnnnnnnnnnnnnnnnnnnnnnnnnnnnnnnnnnnnnnnnnnnnnnnnnnnnnnnnnnnnnnnnnnnnnnnnnnnnnnnnnnnnnnnnnnnnnnnnnnnnnnnnnnnnnnnnnnnnnnnnnnnnnnnnnnnnnnnnnnnnnnnnnnnnnnnnnnnnnnnnnnnnnnnnnnnnnnnnnnnnnnnnnnnnnnnnnnnnnnnnnnnnnnnnnnnnnnnnnnnnnnnnnnnnnnnnnnnnnnnnnnnnnnnnnnnnnnnnnnnnnnnnnnnnnnnnnnnnnnnnnnnnnnnnnnnnnnnnnnnnnnnnnnnnnnnnnnnnnnnnnnnnnnnnnnnnnnnnnnnnnnnnnnnnnnnnnnnnnnnnnnnnnnnnnnnnnnnnnnnnnnnnnnnnnnnnnnnnnnnnnnnnnnnnnnnnnnnnnnnnnnnnnnnnnnnnnnnnnnnnnnnnnnnnnnnnnnnnnnnnnnnnnnnnnnnnnnnnnnnnnnnnnnnnnnnnnnnnnnnnnnnnnnnnnnnnnnnnnnnnnnnnnnnnnnnnnnnnnnnnnnnnnnnnnnnnnnnnnnnnnnnnnnnnnnnnnnnnnnnnnnnnnnnnnnnnnnnnnnnnnnnnnnnnnnnnnnnnnnnnnnnnnnnnnnnnnnnnnnnnnnnnnnnnnnnnnnnnnnnnnnnnnnnnnnnnnnnnnnnnnnnnnnnnnnnnnnnnnnnnnnnnnnnnnnnnnnnnnnnnnnnnnnnnnnnnnnnnnnnnnnnnnnnnnnnnnnnnnnnnnnnnnnnnnnnnnnnnnnnnnnnnnnnnnnnnnnnnnnnnnnnnnnnnnnnnnnnnnnnnnnnnnnnnnnnnnnnnnnnnnnnnnnnnnnnnnnnnnnnnnnnnnnnnnnnnnnnnnnnnnnnnnnnnnnnnnnnnnnnnnnnnnnnnnnnnnnnnnnnnnnnnnnnnnnnnnnnnnnnnnnnnnnnnnnnnnnnnnnnnnnnnnnnnnnnnnnnnnnnnnnnnnnnnnnnnnnnnnnnnnnnnnnnnnnnnnnnnnnnnnnnnnnnnnnnnnnnnnnnnnnnnnnnnnnnnnnnnnnnnnnnnnnnnnnnnnnnnnnnnnnnnnnnnnnnnnnnnnnnnnnnnnnnnnnnnnnnnnnnnnnnnnnnnnnnnnnnnnnnnnnnnnnnnnnnnnnnnnnnnnnnnnnnnnnnnnnnnnnnnnnnnnnnnnnnnnnnnnnnnnnnnnnnnnnnnnnnnnnnnnnnnnnnnnnnnnnnnnnnnnnnnnnnnnnnnnnnnnnnnnnnnnnnnnnnnnnnnnnnnnnnnnnnnnnnnnnnnnnnnnnnnnnnnnnnnnnnnnnnnnnnnnnnnnnnnnnnnnnnnnnnnnnnnnnnnnnnnnnnnnnnnnnnnnnnnnnnnnnnnnnnnnnnnnnnnnnnnnnnnnnnnnnnnnnnnnnnnnnnnnnnnnnnnnnnnnnnnnnnnnnnnnnnnnnnnnnnnnnnnnnnnnnnnnnnnnnnnnnnnnnnnnnnnnnnnnnnnnnnnnnnnnnnnnnnnnnnnnnnnnnnnnnnnnnnnnnnnnnnnnnnnnnnnnnnnnnnnnnnnnnnnnnnnnnnnnnnnnnnnnnnnnnnnnnnnnnnnnnnnnnnnnnnnnnnnnnnnnnnnnnnnnnnnnnnnnnnnnnnnnnnnnnnnnnnnnnnnnnnnnnnnnnnnnnnnnnnnnnnnnnnnnnnnnnnnnnnnnnnnnnnnnnnnnnnnnnnnnnnnnnnnnnnnnnnnnnnnnnnnnnnnnnnnnnnnnnnnnnnnnnnnnnnnnnnnnnnnnnnnnnnnnnnnnnnnnnnnnnnnnnnnnnnnnnnnnnnnnnnnnnnnnnnnnnnnnnnnnnnnnnnnnnnnnnnnnnnnnnnnnnnnnnnnnnnnnnnnnnnnnnnnnnnnnnnnnnnnnnnnnnnnnnnnnnnnnnnnnnnnnnnnnnnnnnnnnnnnnnnnnnnnnnnnnnnnnnnnnnnnnnnnnnnnnnnnnnnnnnnnnnnnnnnnnnnnnnnnnnnnnnnnnnnnnnnnnnnnnnnnnnnnnnnnnnnnnnnnnnnnnnnnnnnnnnnnnnnnnnnnnnnnnnnnnnnnnnnnnnnnnnnnnnnnnnnnnnnnnnnnnnnnnnnnnnnnnnnnnnnnnnnnnnnnnnnnnnnnnnnnnnnnnnnnnnnnnnnnnnnnnnnnnnnnnnnnnnnnnnnnnnnnnnnnnnnnnnnnnnnnnnnnnnnnnnnnnnnnnnnnnnnnnnnnnnnnnnnnnnnnnnnnnnnnnnnnnnnnnnnnnnnnnnnnnnnnnnnnnnnnnnnnnnnnnnnnnnnnnnnnnnnnnnnnnnnnnnnnnnnnnnnnnnnnnnnnnnnnnnnnnnnnnnnnnnnnnnnnnnnnnnnnnnnnnnnnnnnnnnnnnnnnnnnnnnnnnnnnnnnnnnnnnnnnnnnnnnnnnnnnnnnnnnnnnnnnnnnnnnnnnnnnnnnnnnnnnnnnnnnnnnnnnnnnnnnnnnnnnnnnnnnnnnnnnnnnnnnnnnnnnnnnnnnnnnnnnnnnnnnnnnnnnnnnnnnnnnnnnnnnnnnnnnnnnnnnnnnnnnnnnnnnnnnnnnnnnnnnnnnnnnnnnnnnnnnnnnnnnnnnnnnnnnnnnnnnnnnnnnnnnnnnnnnnnnnnnnnnnnnnnnnnnnnnnnnnnnnnnnnnnnnnnnnnnnnnnnnnnnnnnnnnnnnnnnnnnnnnnnnnnnnnnnnnnnnnnnnnnnnnnnnnnnnnnnnnnnnnnnnnnnnnnnnnnnnnnnnnnnnnnnnnnnnnnnnnnnnnnnnnnnnnnnnnnnnnnnnnnnnnnnnnnnnnnnnnnnnnnnnnnnnnnnnnnnnnnnnnnnnnnnnnnnnnnnnnnnnnnnnnnnnnnnnnnnnnnnnnnnnnnnnnnnnnnnnnnnnnnnnnnnnnnnnnnnnnnnnnnnnnnnnnnnnnnnnnnnnnnnnnnnnnnnnnnnnnnnnnnnnnnnnnnnnnnnnnnnnnnnnnnnnnnnnnnnnnnnnnnnnnnnnnnnnnnnnnnnnnnnnnnnnnnnnnnnnnnnnnnnnnnnnnnnnnnnnnnnnnnnnnnnnnnnnnnnnnnnnnnnnnnnnnnnnnnnnnnnnnnnnnnnnnnnnnnnnnnnnnnnnnnnnnnnnnnnnnnnnnnnnnnnnnnnnnnnnnnnnnnnnnnnnnnnnnnnnnnnnnnnnnnnnnnnnnnnnnnnnnnnnnnnnnnnnnnnnnnnnnnnnnnnnnnnnnnnnnnnnnnnnnnnnnnnnnnnnnnnnnnnnnnnnnnnnnnnnnnnnnnnnnnnnnnnnnnnnnnnnnnnnnnnnnnnnnnnnnnnnnnnnnnnnnnnnnnnnnnnnnnnnnnnnnnnnnnnnnnnnnnnnnnnnnnnnnnnnnnnnnnnnnnnnnnnnnnnnnnnnnnnnnnnnnnnnnnnnnnnnnnnnnnnnnnnnnnnnnnnnnnnnnnnnnnnnnnnnnnnnnnnnnnnnnnnnnnnnnnnnnnnnnnnnnnnnnnnnnnnnnnnnnnnnnnnnnnnnnnnnnnnnnnnnnnnnnnnnnnnnnnnnnnnnnnnnnnnnnnnnnnnnnnnnnnnnnnnnnnnnnnnnnnnnnnnnnnnnnnnnnnnnnnnnnnnnnnnnnnnnnnnnnnnnnnnnnnnnnnnnnnnnnnnnnnnnnnnnnnnnnnnnnnnnnnnnnnnnnnnnnnnnnnnnnnnnnnnnnnnnnnnnnnnnnnnnnnnnnnnnnnnnnnnnnnnnnnnnnnnnnnnnnnnnnnnnnnnnnnnnnnnnnnnnnnnnnnnnnnnnnnnnnnnnnnnnnnnnnnnnnnnnnnnnnnnnnnnnnnnnnnnnnnnnnnnnnnnnnnnnnnnnnnnnnnnnnnnnnnnnnnnnnnnnnnnnnnnnnnnnnnnnnnnnnnnnnnnnnnnnnnnnnnnnnnnnnnnnnnnnnnnnnnnnnnnnnnnnnnnnnnnnnnnnnnnnnnnnnnnnnnnnnnnnnnnnnnnnnnnnnnnnnnnnnnnnnnnnnnnnnnnnnnnnnnnnnnnnnnnnnnnnnnnnnnnnnnnnnnnnnnnnnnnnnnnnnnnnnnnnnnnnnnnnnnnnnnnnnnnnnnnnnnnnnnnnnnnnnnnnnnnnnnnnnnnnnnnnnnnnnnnnnnnnnnnnnnnnnnnnnnnnnnnnnnnnnnnnnnnnnnnnnnnnnnnnnnnnnnnnnnnnnnnnnnnnnnnnnnnnnnnnnnnnnnnnnnnnnnnnnnnnnnnnnnnnnnnnnnnnnnnnnnnnnnnnnnnnnnnnnnnnnnnnnnnnnnnnnnnnnnnnnnnnnnnnnnnnnnnnnnnnnnnnnnnnnnnnnnnnnnnnnnnnnnnnnnnnnnnnnnnnnnnnnnnnnnnnnnnnnnnnnnnnnnnnnnnnnnnnnnnnnnnnnnnnnnnnnnnnnnnnnnnnnnnnnnnnnnnnnnnnnnnnnnnnnnnnnnnnnnnnnnnnnnnnnnnnnnnnnnnnnnnnnnnnnnnnnnnnnnnnnnnnnnnnnnnnnnnnnnnnnnnnnnnnnnnnnnnnnnnnnnnnnnnnnnnnnnnnnnnnnnnnnnnnnnnnnnnnnnnnnnnnnnnnnnnnnnnnnnnnnnnnnnnnnnnnnnnnnnnnnnnnnnnnnnnnnnnnnnnnnnnnnnnnnnnnnnnnnnnnnnnnnnnnnnnnnnnnnnnnnnnnnnnnnnnnnnnnnnnnnnnnnnnnnnnnnnnnnnnnnnnnnnnnnnnnnnnnnnnnnnnnnnnnnnnnnnnnnnnnnnnnnnnnnnnnnnnnnnnnnnnnnnnnnnnnnnnnnnnnnnnnnnnnnnnnnnnnnnnnnnnnnnnnnnnnnnnnnnnnnnnnnnnnnnnnnnnnnnnnnnnnnnnnnnnnnnnnnnnnnnnnnnnnnnnnnnnnnnnnnnnnnnnnnnnnnnnnnnnnnnnnnnnnnnnnnnnnnnnnnnnnnnnnnnnnnnnnnnnnnnnnnnnnnnnnnnnnnnnnnnnnnnnnnnnnnnnnnnnnnnnnnnnnnnnnnnnnnnnnnnnnnnnnnnnnnnnnnnnnnnnnnnnnnnnnnnnnnnnnnnnnnnnnnnnnnnnnnnnnnnnnnnnnnnnnnnnnnnnnnnnnnnnnnnnnnnnnnnnnnnnnnnnnnnnnnnnnnnnnnnnnnnnnnnnnnnnnnnnnnnnnnnnnnnnnnnnnnnnnnnnnnnnnnnnnnnnnnnnnnnnnnnnnnnnnnnnnnnnnnnnnnnnnnnnnnnnnnnnnnnnnnnnnnnnnnnnnnnnnnnnnnnnnnnnnnnnnnnnnnnnnnnnnnnnnnnnnnnnnnnnnnnnnnnnnnnnnnnnnnnnnnnnnnnnnnnnnnnnnnnnnnnnnnnnnnnnnnnnnnnnnnnnnnnnnnnnnnnnnnnnnnnnnnnnnnnnnnnnnnnnnnnnnnnnnnnnnnnnnnnnnnnnnnnnnnnnnnnnnnnnnnnnnnnnnnnnnnnnnnnnnnnnnnnnnnnnnnnnnnnnnnnnnnnnnnnnnnnnnnnnnnnnnnnnnnnnnnnnnnnnnnnnnnnnnnnnnnnnnnnnnnnnnnnnnnnnnnnnnnnnnnnnnnnnnnnnnnnnnnnnnnnnnnnnnnnnnnnnnnnnnnnnnnnnnnnnnnnnnnnnnnnnnnnnnnnnnnnnnnnnnnnnnnnnnnnnnnnnnnnnnnnnnnnnnnnnnnnnnnnnnnnnnnnnnnnnnnnnnnnnnnnnnnnnnnnnnnnnnnnnnnnnnnnnnnnnnnnnnnnnnnnnnnnnnnnnnnnnnnnnnnnnnnnnnnnnnnnnnnnnnnnnnnnnnnnnnnnnnnnnnnnnnnnnnnnnnnnnnnnnnnnnnnnnnnnnnnnnnnnnnnnnnnnnnnnnnnnnnnnnnnnnnnnnnnnnnnnnnnnnnnnnnnnnnnnnnnnnnnnnnnnnnnnnnnnnnnnnnnnnnnnnnnnnnnnnnnnnnnnnnnnnnnnnnnnnnnnnnnnnnnnnnnnnnnnnnnnnnnnnnnnnnnnnnnnnnnnnnnnnnnnnnnnnnnnnnnnnnnnnnnnnnnnnnnnnnnnnnnnnnnnnnnnnnnnnnnnnnnnnnnnnnnnnnnnnnnnnnnnnnnnnnnnnnnnnnnnnnnnnnnnnnnnnnnnnnnnnnnnnnnnnnnnnnnnnnnnnnnnnnnnnnnnnnnnnnnnnnnnnnnnnnnnnnnnnnnnnnnnnnnnnnnnnnnnnnnnnnnnnnnnnnnnnnnnnnnnnnnnnnnnnnnnnnnnnnnnnnnnnnnnnnnnnnnnnnnnnnnnnnnnnnnnnnnnnnnnnnnnnnnnnnnnnnnnnnnnnnnnnnnnnnnnnnnnnnnnnnnnnnnnnnnnnnnnnnnnnnnnnnnnnnnnnnnnnnnnnnnnnnnnnnnnnnnnnnnnnnnnnnnnnnnnnnnnnnnnnnnnnnnnnnnnnnnnnnnnnnnnnnnnnnnnnnnnnnnnnnnnnnnnnnnnnnnnnnnnnnnnnnnnnnnnnnnnnnnnnnnnnnnnnnnnnnnnnnnnnnnnnnnnnnnnnnnnnnnnnnnnnnnnnnnnnnnnnnnnnnnnnnnnnnnnnnnnnnnnnnnnnnnnnnnnnnnnnnnnnnnnnnnnnnnnnnnnnnnnnnnnnnnnnnnnnnnnnnnnnnnnnnnnnnnnnnnnnnnnnnnnnnnnnnnnnnnnnnnnnnnnnnnnnnnnnnnnnnnnnnnnnnnnnnnnnnnnnnnnnnnnnnnnnnnnnnnnnnnnnnnnnnnnnnnnnnnnnnnnnnnnnnnnnnnnnnnnnnnnnnnnnnnnnnnnnnnnnnnnnnnnnnnnnnnnnnnnnnnnnnnnnnnnnnnnnnnnnnnnnnnnnnnnnnnnnnnnnnnnnnnnnnnnnnnnnnnnnnnnnnnnnnnnnnnnnnnnnnnnnnnnnnnnnnnnnnnnnnnnnnnnnnnnnnnnnnnnnnnnnnnnnnnnnnnnnnnnnnnnnnnnnnnnnnnnnnnnnnnnnnnnnnnnnnnnnnnnnnnnnnnnnnnnnnnnnnnnnnnnnnnnnnnnnnnnnnnnnnnnnnnnnnnnnnnnnnnnnnnnnnnnnnnnnnnnnnnnnnnnnnnnnnnnnnnnnnnnnnnnnnnnnnnnnnnnnnnnnnnnnnnnnnnnnnnnnnnnnnnnnnnnnnnnnnnnnnnnnnnnnnnnnnnnnnnnnnnnnnnnnnnnnnnnnnnnnnnnnnnnnnnnnnnnnnnnnnnnnnnnnnnnnnnnnnnnnnnnnnnnnnnnnnnnnnnnnnnnnnnnnnnnnnnnnnnnnnnnnnnnnnnnnnnnnnnnnnnnnnnnnnnnnnnnnnnnnnnnnnnnnnnnnnnnnnnnnnnnnnnnnnnnnnnnnnnnnnnnnnnnnnnnnnnnnnnnnnnnnnnnnnnnnnnnnnnnnnnnnnnnnnnnnnnnnnnnnnnnnnnnnnnnnnnnnnnnnnnnnnnnnnnnnnnnnnnnnnnnnnnnnnnnnnnnnnnnnnnnnnnnnnnnnnnnnnnnnnnnnnnnnnnnnnnnnnnnnnnnnnnnnnnnnnnnnnnnnnnnnnnnnnnnnnnnnnnnnnnnnnnnnnnnnnnnnnnnnnnnnnnnnnnnnnnnnnnnnnnnnnnnnnnnnnnnnnnnnnnnnnnnnnnnnnnnnnnnnnnnnnnnnnnnnnnnnnnnnnnnnnnnnnnnnnnnnnnnnnnnnnnnnnnnnnnnnnnnnnnnnnnnnnnnnnnnnnnnnnnnnnnnnnnnnnnnnnnnnnnnnnnnnnnnnnnnnnnnnnnnnnnnnnnnnnnnnnnnnnnnnnnnnnnnnnnnnnnnnnnnnnnnnnnnnnnnnnnnnnnnnnnnnnnnnnnnnnnnnnnnnnnnnnnnnnnnnnnnnnnnnnnnnnnnnnnnnnnnnnnnnnnnnnnnnnnnnnnnnnnnnnnnnnnnnnnnnnnnnnnnnnnnnnnnnnnnnnnnnnnnnnnnnnnnnnnnnnnnnnnnnnnnnnnnnnnnnnnnnnnnnnnnnnnnnnnnnnnnnnnnnnnnnnnnnnnnnnnnnnnnnnnnnnnnnnnnnnnnnnnnnnnnnnnnnnnnnnnnnnnnnnnnnnnnnnnnnnnnnnnnnnnnnnnnnnnnnnnnnnnnnnnnnnnnnnnnnnnnnnnnnnnnnnnnnnnnnnnnnnnnnnnnnnnnnnnnnnnnnnnnnnnnnnnnnnnnnnnnnnnnnnnnnnnnnnnnnnnnnnnnnnnnnnnnnnnnnnnnnnnnnnnnnnnnnnnnnnnnnnnnnnnnnnnnnnnnnnnnnnnnnnnnnnnnnnnnnnnnnnnnnnnnnnnnnnnnnnnnnnnnnnnnnnnnnnnnnnnnnnnnnnnnnnnnnnnnnnnnnnnnnnnnnnnnnnnnnnnnnnnnnnnnnnnnnnnnnnnnnnnnnnnnnnnnnnnnnnnnnnnnnnnnnnnnnnnnnnnnnnnnnnnnnnnnnnnnnnnnnnnnnnnnnnnnnnnnnnnnnnnnnnnnnnnnnnnnnnnnnnnnnnnnnnnnnnnnnnnnnnnnnnnnnnnnnnnnnnnnnnnnnnnnnnnnnnnnnnnnnnnnnnnnnnnnnnnnnnnnnnnnnnnnnnnnnnnnnnnnnnnnnnnnnnnnnnnnnnnnnnnnnnnnnnnnnnnnnnnnnnnnnnnnnnnnnnnnnnnnnnnnnnnnnnnnnnnnnnnnnnnnnnnnnnnnnnnnnnnnnnnnnnnnnnnnnnnnnnnnnnnnnnnnnnnnnnnnnnnnnnnnnnnnnnnnnnnnnnnnnnnnnnnnnnnnnnnnnnnnnnnnnnnnnnnnnnnnnnnnnnnnnnnnnnnnnnnnnnnnnnnnnnnnnnnnnnnnnnnnnnnnnnnnnnnnnnnnnnnnnnnnnnnnnnnnnnnnnnnnnnnnnnnnnnnnnnnnnnnnnnnnnnnnnnnnnnnnnnnnnnnnnnnnnnnnnnnnnnnnnnnnnnnnnnnnnnnnnnnnnnnnnnnnnnnnnnnnnnnnnnnnnnnnnnnnnnnnnnnnnnnnnnnnnnnnnnnnnnnnnnnnnnnnnnnnnnnnnnnnnnnnnnnnnnnnnnnnnnnnnnnnnnnnnnnnnnnnnnnnnnnnnnnnnnnnnnnnnnnnnnnnnnnnnnnnnnnnnnnnnnnnnnnnnnnnnnnnnnnnnnnnnnnnnnnnnnnnnnnnnnnnnnnnnnnnnnnnnnnnnnnnnnnnnnnnnnnnnnnnnnnnnnnnnnnnnnnnnnnnnnnnnnnnnnnnnnnnnnnnnnnnnnnnnnnnnnnnnnnnnnnnnnnnnnnnnnnnnnnnnnnnnnnnnnnnnnnnnnnnnnnnnnnnnnnnnnnnnnnnnnnnnnnnnnnnnnnnnnnnnnnnnnnnnnnnnnnnnnnnnnnnnnnnnnnnnnnnnnnnnnnnnnnnnnnnnnnnnnnnnnnnnnnnnnnnnnnnnnnnnnnnnnnnnnnnnnnnnnnnnnnnnnnnnnnnnnnnnnnnnnnnnnnnnnnnnnnnnnnnnnnnnnnnnnnnnnnnnnnnnnnnnnnnnnnnnnnnnnnnnnnnnnnnnnnnnnnnnnnnnnnnnnnnnnnnnnnnnnnnnnnnnnnnnnnnnnnnnnnnnnnnnnnnnnnnnnnnnnnnnnnnnnnnnnnnnnnnnnnnnnnnnnnnnnnnnnnnnnnnnnnnnnnnnnnnnnnnnnnnnnnnnnnnnnnnnnnnnnnnnnnnnnnnnnnnnnnnnnnnnnnnnnnnnnnnnnnnnnnnnnnnnnnnnnnnnnnnnnnnnnnnnnnnnnnnnnnnnnnnnnnnnnnnnnnnnnnnnnnnnnnnnnnnnnnnnnnnnnnnnnnnnnnnnnnnnnnnnnnnnnnnnnnnnnnnnnnnnnnnnnnnnnnnnnnnnnnnnnnnnnnnnnnnnnnnnnnnnnnnnnnnnnnnnnnnnnnnnnnnnnnnnnnnnnnnnnnnnnnnnnnnnnnnnnnnnnnnnnnnnnnnnnnnnnnnnnnnnnnnnnnnnnnnnnnnnnnnnnnnnnnnnnnnnnnnnnnnnnnnnnnnnnnnnnnnnnnnnnnnnnnnnnnnnnnnnnnnnnnnnnnnnnnnnnnnnnnnnnnnnnnnnnnnnnnnnnnnnnnnnnnnnnnnnnnnnnnnnnnnnnnnnnnnnnnnnnnnnnnnnnnnnnnnnnnnnnnnnnnnnnnnnnnnnnnnnnnnnnnnnnnnnnnnnnnnnnnnnnnnnnnnnnnnnnnnnnnnnnnnnnnnnnnnnnnnnnnnnnnnnnnnnnnnnnnnnnnnnnnnnnnnnnnnnnnnnnnnnnnnnnnnnnnnnnnnnnnnnnnnnnnnnnnnnnnnnnnnnnnnnnnnnnnnnnnnnnnnnnnnnnnnnnnnnnnnnnnnnnnnnnnnnnnnnnnnnnnnnnnnnnnnnnnnnnnnnnnnnnnnnnnnnnnnnnnnnnnnnnnnnnnnnnnnnnnnnnnnnnnnnnnnnnnnnnnnnnnnnnnnnnnnnnnnnnnnnnnnnnnnnnnnnnnnnnnnnnnnnnnnnnnnnnnnnnnnnnnnnnnnnnnnnnnnnnnnnnnnnnnnnnnnnnnnnnnnnnnnnnnnnnnnnnnnnnnnnnnnnnnnnnnnnnnnnnnnnnnnnnnnnnnnnnnnnnnnnnnnnnnnnnnnnnnnnnnnnnnnnnnnnnnnnnnnnnnnnnnnnnnnnnnnnnnnnnnnnnnnnnnnnnnnnnnnnnnnnnnnnnnnnnnnnnnnnnnnnnnnnnnnnnnnnnnnnnnnnnnnnnnnnnnnnnnnnnnnnnnnnnnnnnnnnnnnnnnnnnnnnnnnnnnnnnnnnnnnnnnnnnnnnnnnnnnnnnnnnnnnnnnnnnnnnnnnnnnnnnnnnnnnnnnnnnnnnnnnnnnnnnnnnnnnnnnnnnnnnnnnnnnnnnnnnnnnnnnnnnnnnnnnnnnnnnnnnnnnnnnnnnnnnnnnnnnnnnnnnnnnnnnnnnnnnnnnnnnnnnnnnnnnnnnnnnnnnnnnnnnnnnnnnnnnnnnnnnnnnnnnnnnnnnnnnnnnnnnnnnnnnnnnnnnnnnnnnnnnnnnnnnnnnnnnnnnnnnnnnnnnnnnnnnnnnnnnnnnnnnnnnnnnnnnnnnnnnnnnnnnnnnnnnnnnnnnnnnnnnnnnnnnnnnnnnnnnnnnnnnnnnnnnnnnnnnnnnnnnnnnnnnnnnnnnnnnnnnnnnnnnnnnnnnnnnnnnnnnnnnnnnnnnnnnnnnnnnnnnnnnnnnnnnnnnnnnnnnnnnnnnnnnnnnnnnnnnnnnnnnnnnnnnnnnnnnnnnnnnnnnnnnnnnnnnnnnnnnnnnnnnnnnnnnnnnnnnnnnnnnnnnnnnnnnnnnnnnnnnnnnnnnnnnnnnnnnnnnnnnnnnnnnnnnnnnnnnnnnnnnnnnnnnnnnnnnnnnnnnnnnnnnnnnnnnnnnnnnnnnnnnnnnnnnnnnnnnnnnnnnnnnnnnnnnnnnnnnnnnnnnnnnnnnnnnnnnnnnnnnnnnnnnnnnnnnnnnnnnnnnnnnnnnnnnnnnnnnnnnnnnnnnnnnnnnnnnnnnnnnnnnnnnnnnnnnnnnnnnnnnnnnnnnnnnnnnnnnnnnnnnnnnnnnnnnnnnnnnnnnnnnnnnnnnnnnnnnnnnnnnnnnnnnnnnnnnnnnnnnnnnnnnnnnnnnnnnnnnnnnnnnnnnnnnnnnnnnnnnnnnnnnnnnnnnnnnnnnnnnnnnnnnnnnnnnnnnnnnnnnnnnnnnnnnnnnnnnnnnnnnnnnnnnnnnnnnnnnnnnnnnnnnnnnnnnnnnnnnnnnnnnnnnnnnnnnnnnnnnnnnnnnnnnnnnnnnnnnnnnnnnnnnnnnnnnnnnnnnnnnnnnnnnnnnnnnnnnnnnnnnnnnnnnnnnnnnnnnnnnnnnnnnnnnnnnnnnnnnnnnnnnnnnnnnnnnnnnnnnnnnnnnnnnnnnnnnnnnnnnnnnnnnnnnnnnnnnnnnnnnnnnnnnnnnnnnnnnnnnnnnnnnnnnnnnnnnnnnnnnnnnnnnnnnnnnnnnnnnnnnnnnnnnnnnnnnnnnnnnnnnnnnnnnnnnnnnnnnnnnnnnnnnnnnnnnnnnnnnnnnnnnnnnnnnnnnnnnnnnnnnnnnnnnnnnnnnnnnnnnnnnnnnnnnnnnnnnnnnnnnnnnnnnnnnnnnnnnnnnnnnnnnnnnnnnnnnnnnnnnnnnnnnnnnnnnnnnnnnnnnnnnnnnnnnnnnnnnnnnnnnnnnnnnnnnnnnnnnnnnnnnnnnnnnnnnnnnnnnnnnnnnnnnnnnnnnnnnnnnnnnnnnnnnnnnnnnnnnnnnnnnnnnnnnnnnnnnnnnnnnnnnnnnnnnnnnnnnnnnnnnnnnnnnnnnnnnnnnnnnnnnnnnnnnnnnnnnnnnnnnnnnnnnnnnnnnnnnnnnnnnnnnnnnnnnnnnnnnnnnnnnnnnnnnnnnnnnnnnnnnnnnnnnnnnnnnnnnnnnnnnnnnnnnnnnnnnnnnnnnnnnnnnnnnnnnnnnnnnnnnnnnnnnnnnnnnnnnnnnnnnnnnnnnnnnnnnnnnnnnnnnnnnnnnnnnnnnnnnnnnnnnnnnnnnnnnnnnnnnnnnnnnnnnnnnnnnnnnnnnnnnnnnnnnnnnnnnnnnnnnnnnnnnnnnnnnnnnnnnnnnnnnnnnnnnnnnnnnnnnnnnnnnnnnnnnnnnnnnnnnnnnnnnnnnnnnnnnnnnnnnnnnnnnnnnnnnnnnnnnnnnnnnnnnnnnnnnnnnnnnnnnnnnnnnnnnnnnnnnnnnnnnnnnnnnnnnnnnnnnnnnnnnnnnnnnnnnnnnnnnnnnnnnnnnnnnnnnnnnnnnnnnnnnnnnnnnnnnnnnnnnnnnnnnnnnnnnnnnnnnnnnnnnnnnnnnnnnnnnnnnnnnnnnnnnnnnnnnnnnnnnnnnnnnnnnnnnnnnnnnnnnnnnnnnnnnnnnnnnnnnnnnnnnnnnnnnnnnnnnnnnnnnnnnnnnnnnnnnnnnnnnnnnnnnnnnnnnnnnnnnnnnnnnnnnnnnnnnnnnnnnnnnnnnnnnnnnnnnnnnnnnnnnnnnnnnnnnnnnnnnnnnnnnnnnnnnnnnnnnnnnnnnnnnnnnnnnnnnnnnnnnnnnnnnnnnnnnnnnnnnnnnnnnnnnnnnnnnnnnnnnnnnnnnnnnnnnnnnnnnnnnnnnnnnnnnnnnnnnnnnnnnnnnnnnnnnnnnnnnnnnnnnnnnnnnnnnnnnnnnnnnnnnnnnnnnnnnnnnnnnnnnnnnnnnnnnnnnnnnnnnnnnnnnnnnnnnnnnnnnnnnnnnnnnnnnnnnnnnnnnnnnnnnnnnnnnnnnnnnnnnnnnnnnnnnnnnnnnnnnnnnnnnnnnnnnnnnnnnnnnnnnnnnnnnnnnnnnnnnnnnnnnnnnnnnnnnnnnnnnnnnnnnnnnnnnnnnnnnnnnnnnnnnnnnnnnnnnnnnnnnnnnnnnnnnnnnnnnnnnnnnnnnnnnnnnnnnnnnnnnnnnnnnnnnnnnnnnnnnnnnnnnnnnnnnnnnnnnnnnnnnnnnnnnnnnnnnnnnnnnnnnnnnnnnnnnnnnnnnnnnnnnnnnnnnnnnnnnnnnnnnnnnnnnnnnnnnnnnnnnnnnnnnnnnnnnnnnnnnnnnnnnnnnnnnnnnnnnnnnnnnnnnnnnnnnnnnnnnnnnnnnnnnnnnnnnnnnnnnnnnnnnnnnnnnnnnnnnnnnnnnnnnnnnnnnnnnnnnnnnnnnnnnnnnnnnnnnnnnnnnnnnnnnnnnnnnnnnnnnnnnnnnnnnnnnnnnnnnnnnnnnnnnnnnnnnnnnnnnnnnnnnnnnnnnnnnnnnnnnnnnnnnnnnnnnnnnnnnnnnnnnnnnnnnnnnnnnnnnnnnnnnnnnnnnnnnnnnnnnnnnnnnnnnnnnnnnnnnnnnnnnnnnnnnnnnnnnnnnnnnnnnnnnnnnnnnnnnnnnnnnnnnnnnnnnnnnnnnnnnnnnnnnnnnnnnnnnnnnnnnnnnnnnnnnnnnnnnnnnnnnnnnnnnnnnnnnnnnnnnnnnnnnnnnnnnnnnnnnnnnnnnnnnnnnnnnnnnnnnnnnnnnnnnnnnnnnnnnnnnnnnnnnnnnnnnnnnnnnnnnnnnnnnnnnnnnnnnnnnnnnnnnnnnnnnnnnnnnnnnnnnnnnnnnnnnnnnnnnnnnnnnnnnnnnnnnnnnnnnnnnnnnnnnnnnnnnnnnnnnnnnnnnnnnnnnnnnnnnnnnnnnnnnnnnnnnnnnnnnnnnnnnnnnnnnnnnnnnnnnnnnnnnnnnnnnnnnnnnnnnnnnnnnnnnnnnnnnnnnnnnnnnnnnnnnnnnnnnnnnnnnnnnnnnnnnnnnnnnnnnnnnnnnnnnnnnnnnnnnnnnnnnnnnnnnnnnnnnnnnnnnnnnnnnnnnnnnnnnnnnnnnnnnnnnnnnnnnnnnnnnnnnnnnnnnnnnnnnnnnnnnnnnnnnnnnnnnnnnnnnnnnnnnnnnnnnnnnnnnnnnnnnnnnnnnnnnnnnnnnnnnnnnnnnnnnnnnnnnnnnnnnnnnnnnnnnnnnnnnnnnnnnnnnnnnnnnnnnnnnnnnnnnnnnnnnnnnnnnnnnnnnnnnnnnnnnnnnnnnnnnnnnnnnnnnnnnnnnnnnnnnnnnnnnnnnnnnnnnnnnnnnnnnnnnnnnnnnnnnnnnnnnnnnnnnnnnnnnnnnnnnnnnnnnnnnnnnnnnnnnnnnnnnnnnnnnnnnnnnnnnnnnnnnnnnnnnnnnnnnnnnnnnnnnnnnnnnnnnnnnnnnnnnnnnnnnnnnnnnnnnnnnnnnnnnnnnnnnnnnnnnnnnnnnnnnnnnnnnnnnnnnnnnnnnnnnnnnnnnnnnnnnnnnnnnnnnnnnnnnnnnnnnnnnnnnnnnnnnnnnnnnnnnnnnnnnnnnnnnnnnnnnnnnnnnnnnnnnnnnnnnnnnnnnnnnnnnnnnnnnnnnnnnnnnnnnnnnnnnnnnnnnnnnnnnnnnnnnnnnnnnnnnnnnnnnnnnnnnnnnnnnnnnnnnnnnnnnnnnnnnnnnnnnnnnnnnnnnnnnnnnnnnnnnnnnnnnnnnnnnnnnnnnnnnnnnnnnnnnnnnnnnnnnnnnnnnnnnnnnnnnnnnnnnnnnnnnnnnnnnnnnnnnnnnnnnnnnnnnnnnnnnnnnnnnnnnnnnnnnnnnnnnnnnnnnnnnnnnnnnnnnnnnnnnnnnnnnnnnnnnnnnnnnnnnnnnnnnnnnnnnnnnnnnnnnnnnnnnnnnnnnnnnnnnnnnnnnnnnnnnnnnnnnnnnnnnnnnnnnnnnnnnnnnnnnnnnnnnnnnnnnnnnnnnnnnnnnnnnnnnnnnnnnnnnnnnnnnnnnnnnnnnnnnnnnnnnnnnnnnnnnnnnnnnnnnnnnnnnnnnnnnnnnnnnnnnnnnnnnnnnnnnnnnnnnnnnnnnnnnnnnnnnnnnnnnnnnnnnnnnnnnnnnnnnnnnnnnnnnnnnnnnnnnnnnnnnnnnnnnnnnnnnnnnnnnnnnnnnnnnnnnnnnnnnnnnnnnnnnnnnnnnnnnnnnnnnnnnnnnnnnnnnnnnnnnnnnnnnnnnnnnnnnnnnnnnnnnnnnnnnnnnnnnnnnnnnnnnnnnnnnnnnnnnnnnnnnnnnnnnnnnnnnnnnnnnnnnnnnnnnnnnnnnnnnnnnnnnnnnnnnnnnnnnnnnnnnnnnnnnnnnnnnnnnnnnnnnnnnnnnnnnnnnnnnnnnnnnnnnnnnnnnnnnnnnnnnnnnnnnnnnnnnnnnnnnnnnnnnnnnnnnnnnnnnnnnnnnnnnnnnnnnnnnnnnnnnnnnnnnnnnnnnnnnnnnnnnnnnnnnnnnnnnnnnnnnnnnnnnnnnnnnnnnnnnnnnnnnnnnnnnnnnnnnnnnnnnnnnnnnnnnnnnnnnnnnnnnnnnnnnnnnnnnnnnnnnnnnnnnnnnnnnnnnnnnnnnnnnnnnnnnnnnnnnnnnnnnnnnnnnnnnnnnnnnnnnnnnnnnnnnnnnnnnnnnnnnnnnnnnnnnnnnnnnnnnnnnnnnnnnnnnnnnnnnnnnnnnnnnnnnnnnnnnnnnnnnnnnnnnnnnnnnnnnnnnnnnnnnnnnnnnnnnnnnnnnnnnnnnnnnnnnnnnnnnnnnnnnnnnnnnnnnnnnnnnnnnnnnnnnnnnnnnnnnnnnnnnnnnnnnnnnnnnnnnnnnnnnnnnnnnnnnnnnnnnnnnnnnnnnnnnnnnnnnnnnnnnnnnnnnnnnnnnnnnnnnnnnnnnnnnnnnnnnnnnnnnnnnnnnnnnnnnnnnnnnnnnnnnnnnnnnnnnnnnnnnnnnnnnnnnnnnnnnnnnnnnnnnnnnnnnnnnnnnnnnnnnnnnnnnnnnnnnnnnnnnnnnnnnnnnnnnnnnnnnnnnnnnnnnnnnnnnnnnnnnnnnnnnnnnnnnnnnnnnnnnnnnnnnnnnnnnnnnnnnnnnnnnnnnnnnnnnnnnnnnnnnnnnnnnnnnnnnnnnnnnnnnnnnnnnnnnnnnnnnnnnnnnnnnnnnnnnnnnnnnnnnnnnnnnnnnnnnnnnnnnnnnnnnnnnnnnnnnnnnnnnnnnnnnnnnnnnnnnnnnnnnnnnnnnnnnnnnnnnnnnnnnnnnnnnnnnnnnnnnnnnnnnnnnnnnnnnnnnnnnnnnnnnnnnnnnnnnnnnnnnnnnnnnnnnnnnnnnnnnnnnnnnnnnnnnnnnnnnnnnnnnnnnnnnnnnnnnnnnnnnnnnnnnnnnnnnnnnnnnnnnnnnnnnnnnnnnnnnnnnnnnnnnnnnnnnnnnnnnnnnnnnnnnnnnnnnnnnnnnnnnnnnnnnnnnnnnnnnnnnnnnnnnnnnnnnnnnnnnnnnnnnnnnnnnnnnnnnnnnnnnnnnnnnnnnnnnnnnnnnnnnnnnnnnnnnnnnnnnnnnnnnnnnnnnnnnnnnnnnnnnnnnnnnnnnnnnnnnnnnnnnnnnnnnnnnnnnnnnnnnnnnnnnnnnnnnnnnnnnnnnnnnnnnnnnnnnnnnnnnnnnnnnnnnnnnnnnnnnnnnnnnnnnnnnnnnnnnnnnnnnnnnnnnnnnnnnnnnnnnnnnnnnnnnnnnnnnnnnnnnnnnnnnnnnnnnnnnnnnnnnnnnnnnnnnnnnnnnnnnnnnnnnnnnnnnnnnnnnnnnnnnnnnnnnnnnnnnnnnnnnnnnnnnnnnnnnnnnnnnnnnnnnnnnnnnnnnnnnnnnnnnnnnnnnnnnnnnnnnnnnnnnnnnnnnnnnnnnnnnnnnnnnnnnnnnnnnnnnnnnnnnnnnnnnnnnnnnnnnnnnnnnnnnnnnnnnnnnnnnnnnnnnnnnnnnnnnnnnnnnnnnnnnnnnnnnnnnnnnnnnnnnnnnnnnnnnnnnnnnnnnnnnnnnnnnnnnnnnnnnnnnnnnnnnnnnnnnnnnnnnnnnnnnnnnnnnnnnnnnnnnnnnnnnnnnnnnnnnnnnnnnnnnnnnnnnnnnnnnnnnnnnnnnnnnnnnnnnnnnnnnnnnnnnnnnnnnnnnnnnnnnnnnnnnnnnnnnnnnnnnnnnnnnnnnnnnnnnnnnnnnnnnnnnnnnnnnnnnnnnnnnnnnnnnnnnnnnnnnnnnnnnnnnnnnnnnnnnnnnnnnnnnnnnnnnnnnnnnnnnnnnnnnnnnnnnnnnnnnnnnnnnnnnnnnnnnnnnnnnnnnnnnnnnnnnnnnnnnnnnnnnnnnnnnnnnnnnnnnnnnnnnnnnnnnnnnnnnnnnnnnnnnnnnnnnnnnnnnnnnnnnnnnnnnnnnnnnnnnnnnnnnnnnnnnnnnnnnnnnnnnnnnnnnnnnnnnnnnnnnnnnnnnnnnnnnnnnnnnnnnnnnnnnnnnnnnnnnnnnnnnnnnnnnnnnnnnnnnnnnnnnnnnnnnnnnnnnnnnnnnnnnnnnnnnnnnnnnnnnnnnnnnnnnnnnnnnnnnnnnnnnnnnnnnnnnnnnnnnnnnnnnnnnnnnnnnnnnnnnnnnnnnnnnnnnnnnnnnnnnnnnnnnnnnnnnnnnnnnnnnnnnnnnnnnnnnnnnnnnnnnnnnnnnnnnnnnnnnnnnnnnnnnnnnnnnnnnnnnnnnnnnnnnnnnnnnnnnnnnnnnnnnnnnnnnnnnnnnnnnnnnnnnnnnnnnnnnnnnnnnnnnnnnnnnnnnnnnnnnnnnnnnnnnnnnnnnnnnnnnnnnnnnnnnnnnnnnnnnnnnnnnnnnnnnnnnnnnnnnnnnnnnnnnnnnnnnnnnnnnnnnnnnnnnnnnnnnnnnnnnnnnnnnnnnnnnnnnnnnnnnnnnnnnnnnnnnnnnnnnnnnnnnnnnnnnnnnnnnnnnnnnnnnnnnnnnnnnnnnnnnnnnnnnnnnnnnnnnnnnnnnnnnnnnnnnnnnnnnnnnnnnnnnnnnnnnnnnnnnnnnnnnnnnnnnnnnnnnnnnnnnnnnnnnnnnnnnnnnnnnnnnnnnnnnnnnnnnnnnnnnnnnnnnnnnnnnnnnnnnnnnnnnnnnnnnnnnnnnnnnnnnnnnnnnnnnnnnnnnnnnnnnnnnnnnnnnnnnnnnnnnnnnnnnnnnnnnnnnnnnnnnnnnnnnnnnnnnnnnnnnnnnnnnnnnnnnnnnnnnnnnnnnnnnnnnnnnnnnnnnnnnnnnnnnnnnnnnnnnnnnnnnnnnnnnnnnnnnnnnnnnnnnnnnnnnnnnnnnnnnnnnnnnnnnnnnnnnnnnnnnnnnnnnnnnnnnnnnnnnnnnnnnnnnnnnnnnnnnnnnnnnnnnnnnnnnnnnnnnnnnnnnnnnnnnnnnnnnnnnnnnnnnnnnnnnnnnnnnnnnnnnnnnnnnnnnnnnnnnnnnnnnnnnnnnnnnnnnnnnnnnnnnnnnnnnnnnnnnnnnnnnnnnnnnnnnnnnnnnnnnnnnnnnnnnnnnnnnnnnnnnnnnnnnnnnnnnnnnnnnnnnnnnnnnnnnnnnnnnnnnnnnnnnnnnnnnnnnnnnnnnnnnnnnnnnnnnnnnnnnnnnnnnnnnnnnnnnnnnnnnnnnnnnnnnnnnnnnnnnnnnnnnnnnnnnnnnnnnnnnnnnnnnnnnnnnnnnnnnnnnnnnnnnnnnnnnnnnnnnnnnnnnnnnnnnnnnnnnnnnnnnnnnnnnnnnnnnnnnnnnnnnnnnnnnnnnnnnnnnnnnnnnnnnnnnnnnnnnnnnnnnnnnnnnnnnnnnnnnnnnnnnnnnnnnnnnnnnnnnnnnnnnnnnnnnnnnnnnnnnnnnnnnnnnnnnnnnnnnnnnnnnnnnnnnnnnnnnnnnnnnnnnnnnnnnnnnnnnnnnnnnnnnnnnnnnnnnnnnnnnnnnnnnnnnnnnnnnnnnnnnnnnnnnnnnnnnnnnnnnnnnnnnnnnnnnnnnnnnnnnnnnnnnnnnnnnnnnnnnnnnnnnnnnnnnnnnnnnnnnnnnnnnnnnnnnnnnnnnnnnnnnnnnnnnnnnnnnnnnnnnnnnnnnnnnnnnnnnnnnnnnnnnnnnnnnnnnnnnnnnnnnnnnnnnnnnnnnnnnnnnnnnnnnnnnnnnnnnnnnnnnnnnnnnnnnnnnnnnnnnnnnnnnnnnnnnnnnnnnnnnnnnnnnnnnnnnnnnnnnnnnnnnnnnnnnnnnnnnnnnnnnnnnnnnnnnnnnnnnnnnnnnnnnnnnnnnnnnnnnnnnnnnnnnnnnnnnnnnnnnnnnnnnnnnnnnnnnnnnnnnnnnnnnnnnnnnnnnnnnnnnnnnnnnnnnnnnnnnnnnnnnnnnnnnnnnnnnnnnnnnnnnnnnnnnnnnnnnnnnnnnnnnnnnnnnnnnnnnnnnnnnnnnnnnnnnnnnnnnnnnnnnnnnnnnnnnnnnnnnnnnnnnnnnnnnnnnnnnnnnnnnnnnnnnnnnnnnnnnnnnnnnnnnnnnnnnnnnnnnnnnnnnnnnnnnnnnnnnnnnnnnnnnnnnnnnnnnnnnnnnnnnnnnnnnnnnnnnnnnnnnnnnnnnnnnnnnnnnnnnnnnnnnnnnnnnnnnnnnnnnnnnnnnnnnnnnnnnnnnnnnnnnnnnnnnnnnnnnnnnnnnnnnnnnnnnnnnnnnnnnnnnnnnnnnnnnnnnnnnnnnnnnnnnnnnnnnnnnnnnnnnnnnnnnnnnnnnnnnnnnnnnnnnnnnnnnnnnnnnnnnnnnnnnnnnnnnnnnnnnnnnnnnnnnnnnnnnnnnnnnnnnnnnnnnnnnnnnnnnnnnnnnnnnnnnnnnnnnnnnnnnnnnnnnnnnnnnnnnnnnnnnnnnnnnnnnnnnnnnnnnnnnnnnnnnnnnnnnnnnnnnnnnnnnnnnnnnnnnnnnnnnnnnnnnnnnnnnnnnnnnnnnnnnnnnnnnnnnnnnnnnnnnnnnnnnnnnnnnnnnnnnnnnnnnnnnnnnnnnnnnnnnnnnnnnnnnnnnnnnnnnnnnnnnnnnnnnnnnnnnnnnnnnnnnnnnnnnnnnnnnnnnnnnnnnnnnnnnnnnnnnnnnnnnnnnnnnnnnnnnnnnnnnnnnnnnnnnnnnnnnnnnnnnnnnnnnnnnnnnnnnnnnnnnnnnnnnnnnnnnnnnnnnnnnnnnnnnnnnnnnnnnnnnnnnnnnnnnnnnnnnnnnnnnnnnnnnnnnnnnnnnnnnnnnnnnnnnnnnnnnnnnnnnnnnnnnnnnnnnnnnnnnnnnnnnnnnnnnnnnnnnnnnnnnnnnnnnnnnnnnnnnnnnnnnnnnnnnnnnnnnnnnnnnnnnnnnnnnnnnnnnnnnnnnnnnnnnnnnnnnnnnnnnnnnnnnnnnnnnnnnnnnnnnnnnnnnnnnnnnnnnnnnnnnnnnnnnnnnnnnnnnnnnnnnnnnnnnnnnnnnnnnnnnnnnnnnnnnnnnnnnnnnnnnnnnnnnnnnnnnnnnnnnnnnnnnnnnnnnnnnnnnnnnnnnnnnnnnnnnnnnnnnnnnnnnnnnnnnnnnnnnnnnnnnnnnnnnnnnnnnnnnnnnnnnnnnnnnnnnnnnnnnnnnnnnnnnnnnnnnnnnnnnnnnnnnnnnnnnnnnnnnnnnnnnnnnnnnnnnnnnnnnnnnnnnnnnnnnnnnnnnnnnnnnnnnnnnnnnnnnnnnnnnnnnnnnnnnnnnnnnnnnnnnnnnnnnnnnnnnnnnnnnnnnnnnnnnnnnnnnnnnnnnnnnnnnnnnnnnnnnnnnnnnnnnnnnnnnnnnnnnnnnnnnnnnnnnnnnnnnnnnnnnnnnnnnnnnnnnnnnnnnnnnnnnnnnnnnnnnnnnnnnnnnnnnnnnnnnnnnnnnnnnnnnnnnnnnnnnnnnnnnnnnnnnnnnnnnnnnnnnnnnnnnnnnnnnnnnnnnnnnnnnnnnnnnnnnnnnnnnnnnnnnnnnnnnnnnnnnnnnnnnnnnnnnnnnnnnnnnnnnnnnnnnnnnnnnnnnnnnnnnnnnnnnnnnnnnnnnnnnnnnnnnnnnnnnnnnnnnnnnnnnnnnnnnnnnnnnnnnnnnnnnnnnnnnnnnnnnnnnnnnnnnnnnnnnnnnnnnnnnnnnnnnnnnnnnnnnnnnnnnnnnnnnnnnnnnnnnnnnnnnnnnnnnnnnnnnnnnnnnnnnnnnnnnnnnnnnnnnnnnnnnnnnnnnnnnnnnnnnnnnnnnnnnnnnnnnnnnnnnnnnnnnnnnnnnnnnnnnnnnnnnnnnnnnnnnnnnnnnnnnnnnnnnnnnnnnnnnnnnnnnnnnnnnnnnnnnnnnnnnnnnnnnnnnnnnnnnnnnnnnnnnnnnnnnnnnnnnnnnnnnnnnnnnnnnnnnnnnnnnnnnnnnnnnnnnnnnnnnnnnnnnnnnnnnnnnnnnnnnnnnnnnnnnnnnnnnnnnnnnnnnnnnnnnnnnnnnnnnnnnnnnnnnnnnnnnnnnnnnnnnnnnnnnnnnnnnnnnnnnnnnnnnnnnnnnnnnnnnnnnnnnnnnnnnnnnnnnnnnnnnnnnnnnnnnnnnnnnnnnnnnnnnnnnnnnnnnnnnnnnnnnnnnnnnnnnnnnnnnnnnnnnnnnnnnnnnnnnnnnnnnnnnnnnnnnnnnnnnnnnnnnnnnnnnnnnnnnnnnnnnnnnnnnnnnnnnnnnnnnnnnnnnnnnnnnnnnnnnnnnnnnnnnnnnnnnnnnnnnnnnnnnnnnnnnnnnnnnnnnnnnnnnnnnnnnnnnnnnnnnnnnnnnnnnnnnnnnnnnnnnnnnnnnnnnnnnnnnnnnnnnnnnnnnnnnnnnnnnnnnnnnnnnnnnnnnnnnnnnnnnnnnnnnnnnnnnnnnnnnnnnnnnnnnnnnnnnnnnnnnnnnnnnnnnnnnnnnnnnnnnnnnnnnnnnnnnnnnnnnnnnnnnnnnnnnnnnnnnnnnnnnnnnnnnnnnnnnnnnnnnnnnnnnnnnnnnnnnnnnnnnnnnnnnnnnnnnnnnnnnnnnnnnnnnnnnnnnnnnnnnnnnnnnnnnnnnnnnnnnnnnnnnnnnnnnnnnnnnnnnnnnnnnnnnnnnnnnnnnnnnnnnnnnnnnnnnnnnnnnnnnnnnnnnnnnnnnnnnnnnnnnnnnnnnnnnnnnnnnnnnnnnnnnnnnnnnnnnnnnnnnnnnnnnnnnnnnnnnnnnnnnnnnnnnnnnnnnnnnnnnnnnnnnnnnnnnnnnnnnnnnnnnnnnnnnnnnnnnnnnnnnnnnnnnnnnnnnnnnnnnnnnnnnnnnnnnnnnnnnnnnnnnnnnnnnnnnnnnnnnnnnnnnnnnnnnnnnnnnnnnnnnnnnnnnnnnnnnnnnnnnnnnnnnnnnnnnnnnnnnnnnnnnnnnnnnnnnnnnnnnnnnnnnnnnnnnnnnnnnnnnnnnnnnnnnnnnnnnnnnnnnnnnnnnnnnnnnnnnnnnnnnnnnnnnnnnnnnnnnnnnnnnnnnnnnnnnnnnnnnnnnnnnnnnnnnnnnnnnnnnnnnnnnnnnnnnnnnnnnnnnnnnnnnnnnnnnnnnnnnnnnnnnnnnnnnnnnnnnnnnnnnnnnnnnnnnnnnnnnnnnnnnnnnnnnnnnnnnnnnnnnnnnnnnnnnnnnnnnnnnnnnnnnnnnnnnnnnnnnnnnnnnnnnnnnnnnnnnnnnnnnnnnnnnnnnnnnnnnnnnnnnnnnnnnnnnnnnnnnnnnnnnnnnnnnnnnnnnnnnnnnnnnnnnnnnnnnnnnnnnnnnnnnnnnnnnnnnnnnnnnnnnnnnnnnnnnnnnnnnnnnnnnnnnnnnnnnnnnnnnnnnnnnnnnnnnnnnnnnnnnnnnnnnnnnnnnnnnnnnnnnnnnnnnnnnnnnnnnnnnnnnnnnnnnnnnnnnnnnnnnnnnnnnnnnnnnnnnnnnnnnnnnnnnnnnnnnnnnnnnnnnnnnnnnnnnnnnnnnnnnnnnnnnnnnnnnnnnnnnnnnnnnnnnnnnnnnnnnnnnnnnnnnnnnnnnnnnnnnnnnnnnnnnnnnnnnnnnnnnnnnnnnnnnnnnnnnnnnnnnnnnnnnnnnnnnnnnnnnnnnnnnnnnnnnnnnnnnnnnnnnnnnnnnnnnnnnnnnnnnnnnnnnnnnnnnnnnnnnnnnnnnnnnnnnnnnnnnnnnnnnnnnnnnnnnnnnnnnnnnnnnnnnnnnnnnnnnnnnnnnnnnnnnnnnnnnnnnnnnnnnnnnnnnnnnnnnnnnnnnnnnnnnnnnnnnnnnnnnnnnnnnnnnnnnnnnnnnnnnnnnnnnnnnnnnnnnnnnnnnnnnnnnnnnnnnnnnnnnnnnnnnnnnnnnnnnnnnnnnnnnnnnnnnnnnnnnnnnnnnnnnnnnnnnnnnnnnnnnnnnnnnnnnnnnnnnnnnnnnnnnnnnnnnnnnnnnnnnnnnnnnnnnnnnnnnnnnnnnnnnnnnnnnnnnnnnnnnnnnnnnnnnnnnnnnnnnnnnnnnnnnnnnnnnnnnnnnnnnnnnnnnnnnnnnnnnnnnnnnnnnnnnnnnnnnnnnnnnnnnnnnnnnnnnnnnnnnnnnnnnnnnnnnnnnnnnnnnnnnnnnnnnnnnnnnnnnnnnnnnnnnnnnnnnnnnnnnnnnnnnnnnnnnnnnnnnnnnnnnnnnnnnnnnnnnnnnnnnnnnnnnnnnnnnnnnnnnnnnnnnnnnnnnnnnnnnnnnnnnnnnnnnnnnnnnnnnnnnnnnnnnnnnnnnnnnnnnnnnnnnnnnnnnnnnnnnnnnnnnnnnnnnnnnnnnnnnnnnnnnnnnnnnnnnnnnnnnnnnnnnnnnnnnnnnnnnnnnnnnnnnnnnnnnnnnnnnnnnnnnnnnnnnnnnnnnnnnnnnnnnnnnnnnnnnnnnnnnnnnnnnnnnnnnnnnnnnnnnnnnnnnnnnnnnnnnnnnnnnnnnnnnnnnnnnnnnnnnnnnnnnnnnnnnnnnnnnnnnnnnnnnnnnnnnnnnnnnnnnnnnnnnnnnnnnnnnnnnnnnnnnnnnnnnnnnnnnnnnnnnnnnnnnnnnnnnnnnnnnnnnnnnnnnnnnnnnnnnnnnnnnnnnnnnnnnnnnnnnnnnnnnnnnnnnnnnnnnnnnnnnnnnnnnnnnnnnnnnnnnnnnnnnnnnnnnnnnnnnnnnnnnnnnnnnnnnnnnnnnnnnnnnnnnnnnnnnnnnnnnnnnnnnnnnnnnnnnnnnnnnnnnnnnnnnnnnnnnnnnnnnnnnnnnnnnnnnnnnnnnnnnnnnnnnnnnnnnnnnnnnnnnnnnnnnnnnnnnnnnnnnnnnnnnnnnnnnnnnnnnnnnnnnnnnnnnnnnnnnnnnnnnnnnnnnnnnnnnnnnnnnnnnnnnnnnnnnnnnnnnnnnnnnnnnnnnnnnnnnnnnnnnnnnnnnnnnnnnnnnnnnnnnnnnnnnnnnnnnnnnnnnnnnnnnnnnnnnnnnnnnnnnnnnnnnnnnnnnnnnnnnnnnnnnnnnnnnnnnnnnnnnnnnnnnnnnnnnnnnnnnnnnnnnnnnnnnnnnnnnnnnnnnnnnnnnnnnnnnnnnnnnnnnnnnnnnnnnnnnnnnnnnnnnnnnnnnnnnnnnnnnnnnnnnnnnnnnnnnnnnnnnnnnnnnnnnnnnnnnnnnnnnnnnnnnnnnnnnnnnnnnnnnnnnnnnnnnnnnnnnnnnnnnnnnnnnnnnnnnnnnnnnnnnnnnnnnnnnnnnnnnnnnnnnnnnnnnnnnnnnnnnnnnnnnnnnnnnnnnnnnnnnnnnnnnnnnnnnnnnnnnnnnnnnnnnnnnnnnnnnnnnnnnnnnnnnnnnnnnnnnnnnnnnnnnnnnnnnnnnnnnnnnnnnnnnnnnnnnnnnnnnnnnnnnnnnnnnnnnnnnnnnnnnnnnnnnnnnnnnnnnnnnnnnnnnnnnnnnnnnnnnnnnnnnnnnnnnnnnnnnnnnnnnnnnnnnnnnnnnnnnnnnnnnnnnnnnnnnnnnnnnnnnnnnnnnnnnnnnnnnnnnnnnnnnnnnnnnnnnnnnnnnnnnnnnnnnnnnnnnnnnnnnnnnnnnnnnnnnnnnnnnnnnnnnnnnnnnnnnnnnnnnnnnnnnnnnnnnnnnnnnnnnnnnnnnnnnnnnnnnnnnnnnnnnnnnnnnnnnnnnnnnnnnnnnnnnnnnnnnnnnnnnnnnnnnnnnnnnnnnnnnnnnnnnnnnnnnnnnnnnnnnnnnnnnnnnnnnnnnnnnnnnnnnnnnnnnnnnnnnnnnnnnnnnnnnnnnnnnnnnnnnnnnnnnnnnnnnnnnnnnnnnnnnnnnnnnnnnnnnnnnnnnnnnnnnnnnnnnnnnnnnnnnnnnnnnnnnnnnnnnnnnnnnnnnnnnnnnnnnnnnnnnnnnnnnnnnnnnnnnnnnnnnnnnnnnnnnnnnnnnnnnnnnnnnnnnnnnnnnnnnnnnnnnnnnnnnnnnnnnnnnnnnnnnnnnnnnnnnnnnnnnnnnnnnnnnnnnnnnnnnnnnnnnnnnnnnnnnnnnnnnnnnnnnnnnnnnnnnnnnnnnnnnnnnnnnnnnnnnnnnnnnnnnnnnnnnnnnnnnnnnnnnnnnnnnnnnnnnnnnnnnnnnnnnnnnnnnnnnnnnnnnnnnnnnnnnnnnnnnnnnnnnnnnnnnnnnnnnnnnnnnnnnnnnnnnnnnnnnnnnnnnnnnnnnnnnnnnnnnnnnnnnnnnnnnnnnnnnnnnnnnnnnnnnnnnnnnnnnnnnnnnnnnnnnnnnnnnnnnnnnnnnnnnnnnnnnnnnnnnnnnnnnnnnnnnnnnnnnnnnnnnnnnnnnnnnnnnnnnnnnnnnnnnnnnnnnnnnnnnnnnnnnnnnnnnnnnnnnnnnnnnnnnnnnnnnnnnnnnnnnnnnnnnnnnnnnnnnnnnnnnnnnnnnnnnnnnnnnnnnnnnnnnnnnnnnnnnnnnnnnnnnnnnnnnnnnnnnnnnnnnnnnnnnnnnnnnnnnnnnnnnnnnnnnnnnnnnnnnnnnnnnnnnnnnnnnnnnnnnnnnnnnnnnnnnnnnnnnnnnnnnnnnnnnnnnnnnnnnnnnnnnnnnnnnnnnnnnnnnnnnnnnnnnnnnnnnnnnnnnnnnnnnnnnnnnnnnnnnnnnnnnnnnnnnnnnnnnnnnnnnnnnnnnnnnnnnnnnnnnnnnnnnnnnnnnnnnnnnnnnnnnnnnnnnnnnnnnnnnnnnnnnnnnnnnnnnnnnnnnnnnnnnnnnnnnnnnnnnnnnnnnnnnnnnnnnnnnnnnnnnnnnnnnnnnnnnnnnnnnnnnnnnnnnnnnnnnnnnnnnnnnnnnnnnnnnnnnnnnnnnnnnnnnnnnnnnnnnnnnnnnnnnnnnnnnnnnnnnnnnnnnnnnnnnnnnnnnnnnnnnnnnnnnnnnnnnnnnnnnnnnnnnnnnnnnnnnnnnnnnnnnnnnnnnnnnnnnnnnnnnnnnnnnnnnnnnnnnnnnnnnnnnnnnnnnnnnnnnnnnnnnnnnnnnnnnnnnnnnnnnnnnnnnnnnnnnnnnnnnnnnnnnnnnnnnnnnnnnnnnnnnnnnnnnnnnnnnnnnnnnnnnnnnnnnnnnnnnnnnnnnnnnnnnnnnnnnnnnnnnnnnnnnnnnnnnnnnnnnnnnnnnnnnnnnnnnnnnnnnnnnnnnnnnnnnnnnnnnnnnnnnnnnnnnnnnnnnnnnnnnnnnnnnnnnnnnnnnnnnnnnnnnnnnnnnnnnnnnnnnnnnnnnnnnnnnnnnnnnnnnnnnnnnnnnnnnnnnnnnnnnnnnnnnnnnnnnnnnnnnnnnnnnnnnnnnnnnnnnnnnnnnnnnnnnnnnnnnnnnnnnnnnnnnnnnnnnnnnnnnnnnnnnnnnnnnnnnnnnnnnnnnnnnnnnnnnnnnnnnnnnnnnnnnnnnnnnnnnnnnnnnnnnnnnnnnnnnnnnnnnnnnnnnnnnnnnnnnnnnnnnnnnnnnnnnnnnnnnnnnnnnnnnnnnnnnnnnnnnnnnnnnnnnnnnnnnnnnnnnnnnnnnnnnnnnnnnnnnnnnnnnnnnnnnnnnnnnnnnnnnnnnnnnnnnnnnnnnnnnnnnnnnnnnnnnnnnnnnnnnnnnnnnnnnnnnnnnnnnnnnnnnnnnnnnnnnnnnnnnnnnnnnnnnnnnnnnnnnnnnnnnnnnnnnnnnnnnnnnnnnnnnnnnnnnnnnnnnnnnnnnnnnnnnnnnnnnnnnnnnnnnnnnnnnnnnnnnnnnnnnnnnnnnnnnnnnnnnnnnnnnnnnnnnnnnnnnnnnnnnnnnnnnnnnnnnnnnnnnnnnnnnnnnnnnnnnnnnnnnnnnnnnnnnnnnnnnnnnnnnnnnnnnnnnnnnnnnnnnnnnnnnnnnnnnnnnnnnnnnnnnnnnnnnnnnnnnnnnnnnnnnnnnnnnnnnnnnnnnnnnnnnnnnnnnnnnnnnnnnnnnnnnnnnnnnnnnnnnnnnnnnnnnnnnnnnnnnnnnnnnnnnnnnnnnnnnnnnnnnnnnnnnnnnnnnnnnnnnnnnnnnnnnnnnnnnnnnnnnnnnnnnnnnnnnnnnnnnnnnnnnnnnnnnnnnnnnnnnnnnnnnnnnnnnnnnnnnnnnnnnnnnnnnnnnnnnnnnnnnnnnnnnnnnnnnnnnnnnnnnnnnnnnnnnnnnnnnnnnnnnnnnnnnnnnnnnnnnnnnnnnnnnnnnnnnnnnnnnnnnnnnnnnnnnnnnnnnnnnnnnnnnnnnnnnnnnnnnnnnnnnnnnnnnnnnnnnnnnnnnnnnnnnnnnnnnnnnnnnnnnnnnnnnnnnnnnnnnnnnnnnnnnnnnnnnnnnnnnnnnnnnnnnnnnnnnnnnnnnnnnnnnnnnnnnnnnnnnnnnnnnnnnnnnnnnnnnnnnnnnnnnnnnnnnnnnnnnnnnnnnnnnnnnnnnnnnnnnnnnnnnnnnnnnnnnnnnnnnnnnnnnnnnnnnnnnnnnnnnnnnnnnnnnnnnnnnnnnnnnnnnnnnnnnnnnnnnnnnnnnnnnnnnnnnnnnnnnnnnnnnnnnnnnnnnnnnnnnnnnnnnnnnnnnnnnnnnnnnnnnnnnnnnnnnnnnnnnnnnnnnnnnnnnnnnnnnnnnnnnnnnnnnnnnnnnnnnnnnnnnnnnnnnnnnnnnnnnnnnnnnnnnnnnnnnnnnnnnnnnnnnnnnnnnnnnnnnnnnnnnnnnnnnnnnnnnnnnnnnnnnnnnnnnnnnnnnnnnnnnnnnnnnnnnnnnnnnnnnnnnnnnnnnnnnnnnnnnnnnnnnnnnnnnnnnnnnnnnnnnnnnnnnnnnnnnnnnnnnnnnnnnnnnnnnnnnnnnnnnnnnnnnnnnnnnnnnnnnnnnnnnnnnnnnnnnnnnnnnnnnnnnnnnnnnnnnnnnnnnnnnnnnnnnnnnnnnnnnnnnnnnnnnnnnnnnnnnnnnnnnnnnnnnnnnnnnnnnnnnnnnnnnnnnnnnnnnnnnnnnnnnnnnnnnnnnnnnnnnnnnnnnnnnnnnnnnnnnnnnnnnnnnnnnnnnnnnnnnnnnnnnnnnnnnnnnnnnnnnnnnnnnnnnnnnnnnnnnnnnnnnnnnnnnnnnnnnnnnnnnnnnnnnnnnnnnnnnnnnnnnnnnnnnnnnnnnnnnnnnnnnnnnnnnnnnnnnnnnnnnnnnnnnnnnnnnnnnnnnnnnnnnnnnnnnnnnnnnnnnnnnnnnnnnnnnnnnnnnnnnnnnnnnnnnnnnnnnnnnnnnnnnnnnnnnnnnnnnnnnnnnnnnnnnnnnnnnnnnnnnnnnnnnnnnnnnnnnnnnnnnnnnnnnnnnnnnnnnnnnnnnnnnnnnnnnnnnnnnnnnnnnnnnnnnnnnnnnnnnnnnnnnnnnnnnnnnnnnnnnnnnnnnnnnnnnnnnnnnnnnnnnnnnnnnnnnnnnnnnnnnnnnnnnnnnnnnnnnnnnnnnnnnnnnnnnnnnnnnnnnnnnnnnnnnnnnnnnnnnnnnnnnnnnnnnnnnnnnnnnnnnnnnnnnnnnnnnnnnnnnnnnnnnnnnnnnnnnnnnnnnnnnnnnnnnnnnnnnnnnnnnnnnnnnnnnnnnnnnnnnnnnnnnnnnnnnnnnnnnnnnnnnnnnnnnnnnnnnnnnnnnnnnnnnnnnnnnnnnnnnnnnnnnnnnnnnnnnnnnnnnnnnnnnnnnnnnnnnnnnnnnnnnnnnnnnnnnnnnnnnnnnnnnnnnnnnnnnnnnnnnnnnnnnnnnnnnnnnnnnnnnnnnnnnnnnnnnnnnnnnnnnnnnnnnnnnnnnnnnnnnnnnnnnnnnnnnnnnnnnnnnnnnnnnnnnnnnnnnnnnnnnnnnnnnnnnnnnnnnnnnnnnnnnnnnnnnnnnnnnnnnnnnnnnnnnnnnnnnnnnnnnnnnnnnnnnnnnnnnnnnnnnnnnnnnnnnnnnnnnnnnnnnnnnnnnnnnnnnnnnnnnnnnnnnnnnnnnnnnnnnnnnnnnnnnnnnnnnnnnnnnnnnnnnnnnnnnnnnnnnnnnnnnnnnnnnnnnnnnnnnnnnnnnnnnnnnnnnnnnnnnnnnnnnnnnnnnnnnnnnnnnnnnnnnnnnnnnnnnnnnnnnnnnnnnnnnnnnnnnnnnnnnnnnnnnnnnnnnnnnnnnnnnnnnnnnnnnnnnnnnnnnnnnnnnnnnnnnnnnnnnnnnnnnnnnnnnnnnnnnnnnnnnnnnnnnnnnnnnnnnnnnnnnnnnnnnnnnnnnnnnnnnnnnnnnnnnnnnnnnnnnnnnnnnnnnnnnnnnnnnnnnnnnnnnnnnnnnnnnnnnnnnnnnnnnnnnnnnnnnnnnnnnnnnnnnnnnnnnnnnnnnnnnnnnnnnnnnnnnnnnnnnnnnnnnnnnnnnnnnnnnnnnnnnnnnnnnnnnnnnnnnnnnnnnnnnnnnnnnnnnnnnnnnnnnnnnnnnnnnnnnnnnnnnnnnnnnnnnnnnnnnnnnnnnnnnnnnnnnnnnnnnnnnnnnnnnnnnnnnnnnnnnnnnnnnnnnnnnnnnnnnnnnnnnnnnnnnnnnnnnnnnnnnnnnnnnnnnnnnnnnnnnnnnnnnnnnnnnnnnnnnnnnnnnnnnnnnnnnnnnnnnnnnnnnnnnnnnnnnnnnnnnnnnnnnnnnnnnnnnnnnnnnnnnnnnnnnnnnnnnnnnnnnnnnnnnnnnnnnnnnnnnnnnnnnnnnnnnnnnnnnnnnnnnnnnnnnnnnnnnnnnnnnnnnnnnnnnnnnnnnnnnnnnnnnnnnnnnnnnnnnnnnnnnnnnnnnnnnnnnnnnnnnnnnnnnnnnnnnnnnnnnnnnnnnnnnnnnnnnnnnnnnnnnnnnnnnnnnnnnnnnnnnnnnnnnnnnnnnnnnnnnnnnnnnnnnnnnnnnnnnnnnnnnnnnnnnnnnnnnnnnnnnnnnnnnnnnnnnnnnnnnnnnnnnnnnnnnnnnnnnnnnnnnnnnnnnnnnnnnnnnnnnnnnnnnnnnnnnnnnnnnnnnnnnnnnnnnnnnnnnnnnnnnnnnnnnnnnnnnnnnnnnnnnnnnnnnnnnnnnnnnnnnnnnnnnnnnnnnnnnnnnnnnnnnnnnnnnnnnnnnnnnnnnnnnnnnnnnnnnnnnnnnnnnnnnnnnnnnnnnnnnnnnnnnnnnnnnnnnnnnnnnnnnnnnnnnnnnnnnnnnnnnnnnnnnnnnnnnnnnnnnnnnnnnnnnnnnnnnnnnnnnnnnnnnnnnnnnnnnnnnnnnnnnnnnnnnnnnnnnnnnnnnnnnnnnnnnnnnnnnnnnnnnnnnnnnnnnnnnnnnnnnnnnnnnnnnnnnnnnnnnnnnnnnnnnnnnnnnnnnnnnnnnnnnnnnnnnnnnnnnnnnnnnnnnnnnnnnnnnnnnnnnnnnnnnnnnnnnnnnnnnnnnnnnnnnnnnnnnnnnnnnnnnnnnnnnnnnnnnnnnnnnnnnnnnnnnnnnnnnnnnnnnnnnnnnnnnnnnnnnnnnnnnnnnnnnnnnnnnnnnnnnnnnnnnnnnnnnnnnnnnnnnnnnnnnnnnnnnnnnnnnnnnnnnnnnnnnnnnnnnnnnnnnnnnnnnnnnnnnnnnnnnnnnnnnnnnnnnnnnnnnnnnnnnnnnnnnnnnnnnnnnnnnnnnnnnnnnnnnnnnnnnnnnnnnnnnnnnnnnnnnnnnnnnnnnnnnnnnnnnnnnnnnnnnnnnnnnnnnnnnnnnnnnnnnnnnnnnnnnnnnnnnnnnnnnnnnnnnnnnnnnnnnnnnnnnnnnnnnnnnnnnnnnnnnnnnnnnnnnnnnnnnnnnnnnnnnnnnnnnnnnnnnnnnnnnnnnnnnnnnnnnnnnnnnnnnnnnnnnnnnnnnnnnnnnnnnnnnnnnnnnnnnnnnnnnnnnnnnnnnnnnnnnnnnnnnnnnnnnnnnnnnnnnnnnnnnnnnnnnnnnnnnnnnnnnnnnnnnnnnnnnnnnnnnnnnnnnnnnnnnnnnnnnnnnnnnnnnnnnnnnnnnnnnnnnnnnnnnnnnnnnnnnnnnnnnnnnnnnnnnnnnnnnnnnnnnnnnnnnnnnnnnnnnnnnnnnnnnnnnnnnnnnnnnnnnnnnnnnnnnnnnnnnnnnnnnnnnnnnnnnnnnnnnnnnnnnnnnnnnnnnnnnnnnnnnnnnnnnnnnnnnnnnnnnnnnnnnnnnnnnnnnnnnnnnnnnnnnnnnnnnnnnnnnnnnnnnnnnnnnnnnnnnnnnnnnnnnnnnnnnnnnnnnnnnnnnnnnnnnnnnnnnnnnnnnnnnnnnnnnnnnnnnnnnnnnnnnnnnnnnnnnnnnnnnnnnnnnnnnnnnnnnnnnnnnnnnnnnnnnnnnnnnnnnnnnnnnnnnnnnnnnnnnnnnnnnnnnnnnnnnnnnnnnnnnnnnnnnnnnnnnnnnnnnnnnnnnnnnnnnnnnnnnnnnnnnnnnnnnnnnnnnnnnnnnnnnnnnnnnnnnnnnnnnnnnnnnnnnnnnnnnnnnnnnnnnnnnnnnnnnnnnnnnnnnnnnnnnnnnnnnnnnnnnnnnnnnnnnnnnnnnnnnnnnnnnnnnnnnnnnnnnnnnnnnnnnnnnnnnnnnnnnnnnnnnnnnnnnnnnnnnnnnnnnnnnnnnnnnnnnnnnnnnnnnnnnnnnnnnnnnnnnnnnnnnnnnnnnnnnnnnnnnnnnnnnnnnnnnnnnnnnnnnnnnnnnnnnnnnnnnnnnnnnnnnnnnnnnnnnnnnnnnnnnnnnnnnnnnnnnnnnnnnnnnnnnnnnnnnnnnnnnnnnnnnnnnnnnnnnnnnnnnnnnnnnnnnnnnnnnnnnnnnnnnnnnnnnnnnnnnnnnnnnnnnnnnnnnnnnnnnnnnnnnnnnnnnnnnnnnnnnnnnnnnnnnnnnnnnnnnnnnnnnnnnnnnnnnnnnnnnnnnnnnnnnnnnnnnnnnnnnnnnnnnnnnnnnnnnnnnnnnnnnnnnnnnnnnnnnnnnnnnnnnnnnnnnnnnnnnnnnnnnnnnnnnnnnnnnnnnnnnnnnnnnnnnnnnnnnnnnnnnnnnnnnnnnnnnnnnnnnnnnnnnnnnnnnnnnnnnnnnnnnnnnnnnnnnnnnnnnnnnnnnnnnnnnnnnnnnnnnnnnnnnnnnnnnnnnnnnnnnnnnnnnnnnnnnnnnnnnnnnnnnnnnnnnnnnnnnnnnnnnnnnnnnnnnnnnnnnnnnnnnnnnnnnnnnnnnnnnnnnnnnnnnnnnnnnnnnnnnnnnnnnnnnnnnnnnnnnnnnnnnnnnnnnnnnnnnnnnnnnnnnnnnnnnnnnnnnnnnnnnnnnnnnnnnnnnnnnnnnnnnnnnnnnnnnnnnnnnnnnnnnnnnnnnnnnnnnnnnnnnnnnnnnnnnnnnnnnnnnnnnnnnnnnnnnnnnnnnnnnnnnnnnnnnnnnnnnnnnnnnnnnnnnnnnnnnnnnnnnnnnnnnnnnnnnnnnnnnnnnnnnnnnnnnnnnnnnnnnnnnnnnnnnnnnnnnnnnnnnnnnnnnnnnnnnnnnnnnnnnnnnnnnnnnnnnnnnnnnnnnnnnnnnnnnnnnnnnnnnnnnnnnnnnnnnnnnnnnnnnnnnnnnnnnnnnnnnnnnnnnnnnnnnnnnnnnnnnnnnnnnnnnnnnnnnnnnnnnnnnnnnnnnnnnnnnnnnnnnnnnnnnnnnnnnnnnnnnnnnnnnnnnnnnnnnnnnnnnnnnnnnnnnnnnnnnnnnnnnnnnnnnnnnnnnnnnnnnnnnnnnnnnnnnnnnnnnnnnnnnnnnnnnnnnnnnnnnnnnnnnnnnnnnnnnnnnnnnnnnnnnnnnnnnnnnnnnnnnnnnnnnnnnnnnnnnnnnnnnnnnnnnnnnnnnnnnnnnnnnnnnnnnnnnnnnnnnnnnnnnnnnnnnnnnnnnnnnnnnnnnnnnnnnnnnnnnnnnnnnnnnnnnnnnnnnnnnnnnnnnnnnnnnnnnnnnnnnnnnnnnnnnnnnnnnnnnnnnnnnnnnnnnnnnnnnnnnnnnnnnnnnnnnnnnnnnnnnnnnnnnnnnnnnnnnnnnnnnnnnnnnnnnnnnnnnnnnnnnnnnnnnnnnnnnnnnnnnnnnnnnnnnnnnnnnnnnnnnnnnnnnnnnnnnnnnnnnnnnnnnnnnnnnnnnnnnnnnnnnnnnnnnnnnnnnnnnnnnnnnnnnnnnnnnnnnnnnnnnnnnnnnnnnnnnnnnnnnnnnnnnnnnnnnnnnnnnnnnnnnnnnnnnnnnnnnnnnnnnnnnnnnnnnnnnnnnnnnnnnnnnnnnnnnnnnnnnnnnnnnnnnnnnnnnnnnnnnnnnnnnnnnnnnnnnnnnnnnnnnnnnnnnnnnnnnnnnnnnnnnnnnnnnnnnnnnnnnnnnnnnnnnnnnnnnnnnnnnnnnnnnnnnnnnnnnnnnnnnnnnnnnnnnnnnnnnnnnnnnnnnnnnnnnnnnnnnnnnnnnnnnnnnnnnnnnnnnnnnnnnnnnnnnnnnnnnnnnnnnnnnnnnnnnnnnnnnnnnnnnnnnnnnnnnnnnnnnnnnnnnnnnnnnnnnnnnnnnnnnnnnnnnnnnnnnnnnnnnnnnnnnnnnnnnnnnnnnnnnnnnnnnnnnnnnnnnnnnnnnnnnnnnnnnnnnnnnnnnnnnnnnnnnnnnnnnnnnnnnnnnnnnnnnnnnnnnnnnnnnnnnnnnnnnnnnnnnnnnnnnnnnnnnnnnnnnnnnnnnnnnnnnnnnnnnnnnnnnnnnnnnnnnnnnnnnnnnnnnnnnnnnnnnnnnnnnnnnnnnnnnnnnnnnnnnnnnnnnnnnnnnnnnnnnnnnnnnnnnnnnnnnnnnnnnnnnnnnnnnnnnnnnnnnnnnnnnnnnnnnnnnnnnnnnnnnnnnnnnnnnnnnnnnnnnnnnnnnnnnnnnnnnnnnnnnnnnnnnnnnnnnnnnnnnnnnnnnnnnnnnnnnnnnnnnnnnnnnnnnnnnnnnnnnnnnnnnnnnnnnnnnnnnnnnnnnnnnnnnnnnnnnnnnnnnnnnnnnnnnnnnnnnnnnnnnnnnnnnnnnnnnnnnnnnnnnnnnnnnnnnnnnnnnnnnnnnnnnnnnnnnnnnnnnnnnnnnnnnnnnnnnnnnnnnnnnnnnnnnnnnnnnnnnnnnnnnnnnnnnnnnnnnnnnnnnnnnnnnnnnnnnnnnnnnnnnnnnnnnnnnnnnnnnnnnnnnnnnnnnnnnnnnnnnnnnnnnnnnnnnnnnnnnnnnnnnnnnnnnnnnnnnnnnnnnnnnnnnnnnnnnnnnnnnnnnnnnnnnnnnnnnnnnnnnnnnnnnnnnnnnnnnnnnnnnnnnnnnnnnnnnnnnnnnnnnnnnnnnnnnnnnnnnnnnnnnnnnnnnnnnnnnnnnnnnnnnnnnnnnnnnnnnnnnnnnnnnnnnnnnnnnnnnnnnnnnnnnnnnnnnnnnnnnnnnnnnnnnnnnnnnnnnnnnnnnnnnnnnnnnnnnnnnnnnnnnnnnnnnnnnnnnnnnnnnnnnnnnnnnnnnnnnnnnnnnnnnnnnnnnnnnnnnnnnnnnnnnnnnnnnnnnnnnnnnnnnnnnnnnnnnnnnnnnnnnnnnnnnnnnnnnnnnnnnnnnnnnnnnnnnnnnnnnnnnnnnnnnnnnnnnnnnnnnnnnnnnnnnnnnnnnnnnnnnnnnnnnnnnnnnnnnnnnnnnnnnnnnnnnnnnnnnnnnnnnnnnnnnnnnnnnnnnnnnnnnnnnnnnnnnnnnnnnnnnnnnnnnnnnnnnnnnnnnnnnnnnnnnnnnnnnnnnnnnnnnnnnnnnnnnnnnnnnnnnnnnnnnnnnnnnnnnnnnnnnnnnnnnnnnnnnnnnnnnnnnnnnnnnnnnnnnnnnnnnnnnnnnnnnnnnnnnnnnnnnnnnnnnnnnnnnnnnnnnnnnnnnnnnnnnnnnnnnnnnnnnnnnnnnnnnnnnnnnnnnnnnnnnnnnnnnnnnnnnnnnnnnnnnnnnnnnnnnnnnnnnnnnnnnnnnnnnnnnnnnnnnnnnnnnnnnnnnnnnnnnnnnnnnnnnnnnnnnnnnnnnnnnnnnnnnnnnnnnnnnnnnnnnnnnnnnnnnnnnnnnnnnnnnnnnnnnnnnnnnnnnnnnnnnnnnnnnnnnnnnnnnnnnnnnnnnnnnnnnnnnnnnnnnnnnnnnnnnnnnnnnnnnnnnnnnnnnnnnnnnnnnnnnnnnnnnnnnnnnnnnnnnnnnnnnnnnnnnnnnnnnnnnnnnnnnnnnnnnnnnnnnnnnnnnnnnnnnnnnnnnnnnnnnnnnnnnnnnnnnnnnnnnnnnnnnnnnnnnnnnnnnnnnnnnnnnnnnnnnnnnnnnnnnnnnnnnnnnnnnnnnnnnnnnnnnnnnnnnnnnnnnnnnnnnnnnnnnnnnnnnnnnnnnnnnnnnnnnnnnnnnnnnnnnnnnnnnnnnnnnnnnnnnnnnnnnnnnnnnnnnnnnnnnnnnnnnnnnnnnnnnnnnnnnnnnnnnnnnnnnnnnnnnnnnnnnnnnnnnnnnnnnnnnnnnnnnnnnnnnnnnnnnnnnnnnnnnnnnnnnnnnnnnnnnnnnnnnnnnnnnnnnnnnnnnnnnnnnnnnnnnnnnnnnnnnnnnnnnnnnnnnnnnnnnnnnnnnnnnnnnnnnnnnnnnnnnnnnnnnnnnnnnnnnnnnnnnnnnnnnnnnnnnnnnnnnnnnnnnnnnnnnnnnnnnnnnnnnnnnnnnnnnnnnnnnnnnnnnnnnnnnnnnnnnnnnnnnnnnnnnnnnnnnnnnnnnnnnnnnnnnnnnnnnnnnnnnnnnnnnnnnnnnnnnnnnnnnnnnnnnnnnnnnnnnnnnnnnnnnnnnnnnnnnnnnnnnnnnnnnnnnnnnnnnnnnnnnnnnnnnnnnnnnnnnnnnnnnnnnnnnnnnnnnnnnnnnnnnnnnnnnnnnnnnnnnnnnnnnnnnnnnnnnnnnnnnnnnnnnnnnnnnnnnnnnnnnnnnnnnnnnnnnnnnnnnnnnnnnnnnnnnnnnnnnnnnnnnnnnnnnnnnnnnnnnnnnnnnnnnnnnnnnnnnnnnnnnnnnnnnnnnnnnnnnnnnnnnnnnnnnnnnnnnnnnnnnnnnnnnnnnnnnnnnnnnnnnnnnnnnnnnnnnnnnnnnnnnnnnnnnnnnnnnnnnnnnnnnnnnnnnnnnnnnnnnnnnnnnnnnnnnnnnnnnnnnnnnnnnnnnnnnnnnnnnnnnnnnnnnnnnnnnnnnnnnnnnnnnnnnnnnnnnnnnnnnnnnnnnnnnnnnnnnnnnnnnnnnnnnnnnnnnnnnnnnnnnnnnnnnnnnnnnnnnnnnnnnnnnnnnnnnnnnnnnnnnnnnnnnnnnnnnnnnnnnnnnnnnnnnnnnnnnnnnnnnnnnnnnnnnnnnnnnnnnnnnnnnnnnnnnnnnnnnnnnnnnnnnnnnnnnnnnnnnnnnnnnnnnnnnnnnnnnnnnnnnnnnnnnnnnnnnnnnnnnnnnnnnnnnnnnnnnnnnnnnnnnnnnnnnnnnnnnnnnnnnnnnnnnnnnnnnnnnnnnnnnnnnnnnnnnnnnnnnnnnnnnnnnnnnnnnnnnnnnnnnnnnnnnnnnnnnnnnnnnnnnnnnnnnnnnnnnnnnnnnnnnnnnnnnnnnnnnnnnnnnnnnnnnnnnnnnnnnnnnnnnnnnnnnnnnnnnnnnnnnnnnnnnnnnnnnnnnnnnnnnnnnnnnnnnnnnnnnnnnnnnnnnnnnnnnnnnnnnnnnnnnnnnnnnnnnnnnnnnnnnnnnnnnnnnnnnnnnnnnnnnnnnnnnnnnnnnnnnnnnnnnnnnnnnnnnnnnnnnnnnnnnnnnnnnnnnnnnnnnnnnnnnnnnnnnnnnnnnnnnnnnnnnnnnnnnnnnnnnnnnnnnnnnnnnnnnnnnnnnnnnnnnnnnnnnnnnnnnnnnnnnnnnnnnnnnnnnnnnnnnnnnnnnnnnnnnnnnnnnnnnnnnnnnnnnnnnnnnnnnnnnnnnnnnnnnnnnnnnnnnnnnnnnnnnnnnnnnnnnnnnnnnnnnnnnnnnnnnnnnnnnnnnnnnnnnnnnnnnnnnnnnnnnnnnnnnnnnnnnnnnnnnnnnnnnnnnnnnnnnnnnnnnnnnnnnnnnnnnnnnnnnnnnnnnnnnnnnnnnnnnnnnnnnnnnnnnnnnnnnnnnnnnnnnnnnnnnnnnnnnnnnnnnnnnnnnnnnnnnnnnnnnnnnnnnnnnnnnnnnnnnnnnnnnnnnnnnnnnnnnnnnnnnnnnnnnnnnnnnnnnnnnnnnnnnnnnnnnnnnnnnnnnnnnnnnnnnnnnnnnnnnnnnnnnnnnnnnnnnnnnnnnnnnnnnnnnnnnnnnnnnnnnnnnnnnnnnnnnnnnnnnnnnnnnnnnnnnnnnnnnnnnnnnnnnnnnnnnnnnnnnnnnnnnnnnnnnnnnnnnnnnnnnnnnnnnnnnnnnnnnnnnnnnnnnnnnnnnnnnnnnnnnnnnnnnnnnnnnnnnnnnnnnnnnnnnnnnnnnnnnnnnnnnnnnnnnnnnnnnnnnnnnnnnnnnnnnnnnnnnnnnnnnnnnnnnnnnnnnnnnnnnnnnnnnnnnnnnnnnnnnnnnnnnnnnnnnnnnnnnnnnnnnnnnnnnnnnnnnnnnnnnnnnnnnnnnnnnnnnnnnnnnnnnnnnnnnnnnnnnnnnnnnnnnnnnnnnnnnnnnnnnnnnnnnnnnnnnnnnnnnnnnnnnnnnnnnnnnnnnnnnnnnnnnnnnnnnnnnnnnnnnnnnnnnnnnnnnnnnnnnnnnnnnnnnnnnnnnnnnnnnnnnnnnnnnnnnnnnnnnnnnnnnnnnnnnnnnnnnnnnnnnnnnnnnnnnnnnnnnnnnnnnnnnnnnnnnnnnnnnnnnnnnnnnnnnnnnnnnnnnnnnnnnnnnnnnnnnnnnnnnnnnnnnnnnnnnnnnnnnnnnnnnnnnnnnnnnnnnnnnnnnnnnnnnnnnnnnnnnnnnnnnnnnnnnnnnnnnnnnnnnnnnnnnnnnnnnnnnnnnnnnnnnnnnnnnnnnnnnnnnnnnnnnnnnnnnnnnnnnnnnnnnnnnnnnnnnnnnnnnnnnnnnnnnnnnnnnnnnnnnnnnnnnnnnnnnnnnnnnnnnnnnnnnnnnnnnnnnnnnnnnnnnnnnnnnnnnnnnnnnnnnnnnnnnnnnnnnnnnnnnnnnnnnnnnnnnnnnnnnnnnnnnnnnnnnnnnnnnnnnnnnnnnnnnnnnnnnnnnnnnnnnnnnnnnnnnnnnnnnnnnnnnnnnnnnnnnnnnnnnnnnnnnnnnnnnnnnnnnnnnnnnnnnnnnnnnnnnnnnnnnnnnnnnnnnnnnnnnnnnnnnnnnnnnnnnnnnnnnnnnnnnnnnnnnnnnnnnnnnnnnnnnnnnnnnnnnnnnnnnnnnnnnnnnnnnnnnnnnnnnnnnnnnnnnnnnnnnnnnnnnnnnnnnnnnnnnnnnnnnnnnnnnnnnnnnnnnnnnnnnnnnnnnnnnnnnnnnnnnnnnnnnnnnnnnnnnnnnnnnnnnnnnnnnnnnnnnnnnnnnnnnnnnnnnnnnnnnnnnnnnnnnnnnnnnnnnnnnnnnnnnnnnnnnnnnnnnnnnnnnnnnnnnnnnnnnnnnnnnnnnnnnnnnnnnnnnnnnnnnnnnnnnnnnnnnnnnnnnnnnnnnnnnnnnnnnnnnnnnnnnnnnnnnnnnnnnnnnnnnnnnnnnnnnnnnnnnnnnnnnnnnnnnnnnnnnnnnnnnnnnnnnnnnnnnnnnnnnnnnnnnnnnnnnnnnnnnnnnnnnnnnnnnnnnnnnnnnnnnnnnnnnnnnnnnnnnnnnnnnnnnnnnnnnnnnnnnnnnnnnnnnnnnnnnnnnnnnnnnnnnnnnnnnnnnnnnnnnnnnnnnnnnnnnnnnnnnnnnnnnnnnnnnnnnnnnnnnnnnnnnnnnnnnnnnnnnnnnnnnnnnnnnnnnnnnnnnnnnnnnnnnnnnnnnnnnnnnnnnnnnnnnnnnnnnnnnnnnnnnnnnnnnnnnnnnnnnnnnnnnnnnnnnnnnnnnnnnnnnnnnnnnnnnnnnnnnnnnnnnnnnnnnnnnnnnnnnnnnnnnnnnnnnnnnnnnnnnnnnnnnnnnnnnnnnnnnnnnnnnnnnnnnnnnnnnnnnnnnnnnnnnnnnnnnnnnnnnnnnnnnnnnnnnnnnnnnnnnnnnnnnnnnnnnnnnnnnnnnnnnnnnnnnnnnnnnnnnnnnnnnnnnnnnnnnnnnnnnnnnnnnnnnnnnnnnnnnnnnnnnnnnnnnnnnnnnnnnnnnnnnnnnnnnnnnnnnnnnnnnnnnnnnnnnnnnnnnnnnnnnnnnnnnnnnnnnnnnnnnnnnnnnnnnnnnnnnnnnnnnnnnnnnnnnnnnnnnnnnnnnnnnnnnnnnnnnnnnnnnnnnnnnnnnnnnnnnnnnnnnnnnnnnnnnnnnnnnnnnnnnnnnnnnnnnnnnnnnnnnnnnnnnnnnnnnnnnnnnnnnnnnnnnnnnnnnnnnnnnnnnnnnnnnnnnnnnnnnnnnnnnnnnnnnnnnnnnnnnnnnnnnnnnnnnnnnnnnnnnnnnnnnnnnnnnnnnnnnnnnnnnnnnnnnnnnnnnnnnnnnnnnnnnnnnnnnnnnnnnnnnnnnnnnnnnnnnnnnnnnnnnnnnnnnnnnnnnnnnnnnnnnnnnnnnnnnnnnnnnnnnnnnnnnnnnnnnnnnnnnnnnnnnnnnnnnnnnnnnnnnnnnnnnnnnnnnnnnnnnnnnnnnnnnnnnnnnnnnnnnnnnnnnnnnnnnnnnnnnnnnnnnnnnnnnnnnnnnnnnnnnnnnnnnnnnnnnnnnnnnnnnnnnnnnnnnnnnnnnnnnnnnnnnnnnnnnnnnnnnnnnnnnnnnnnnnnnnnnnnnnnnnnnnnnnnnnnnnnnnnnnnnnnnnnnnnnnnnnnnnnnnnnnnnnnnnnnnnnnnnnnnnnnnnnnnnnnnnnnnnnnnnnnnnnnnnnnnnnnnnnnnnnnnnnnnnnnnnnnnnnnnnnnnnnnnnnnnnnnnnnnnnnnnnnnnnnnnnnnnnnnnnnnnnnnnnnnnnnnnnnnnnnnnnnnnnnnnnnnnnnnnnnnnnnnnnnnnnnnnnnnnnnnnnnnnnnnnnnnnnnnnnnnnnnnnnnnnnnnnnnnnnnnnnnnnnnnnnnnnnnnnnnnnnnnnnnnnnnnnnnnnnnnnnnnnnnnnnnnnnnnnnnnnnnnnnnnnnnnnnnnnnnnnnnnnnnnnnnnnnnnnnnnnnnnnnnnnnnnnnnnnnnnnnnnnnnnnnnnnnnnnnnnnnnnnnnnnnnnnnnnnnnnnnnnnnnnnnnnnnnnnnnnnnnnnnnnnnnnnnnnnnnnnnnnnnnnnnnnnnnnnnnnnnnnnnnnnnnnnnnnnnnnnnnnnnnnnnnnnnnnnnnnnnnnnnnnnnnnnnnnnnnnnnnnnnnnnnnnnnnnnnnnnnnnnnnnnnnnnnnnnnnnnnnnnnnnnnnnnnnnnnnnnnnnnnnnnnnnnnnnnnnnnnnnnnnnnnnnnnnnnnnnnnnnnnnnnnnnnnnnnnnnnnnnnnnnnnnnnnnnnnnnnnnnnnnnnnnnnnnnnnnnnnnnnnnnnnnnnnnnnnnnnnnnnnnnnnnnnnnnnnnnnnnnnnnnnnnnnnnnnnnnnnnnnnnnnnnnnnnnnnnnnnnnnnnnnnnnnnnnnnnnnnnnnnnnnnnnnnnnnnnnnnnnnnnnnnnnnnnnnnnnnnnnnnnnnnnnnnnnnnnnnnnnnnnnnnnnnnnnnnnnnnnnnnnnnnnnnnnnnnnnnnnnnnnnnnnnnnnnnnnnnnnnnnnnnnnnnnnnnnnnnnnnnnnnnnnnnnnnnnnnnnnnnnnnnnnnnnnnnnnnnnnnnnnnnnnnnnnnnnnnnnnnnnnnnnnnnnnnnnnnnnnnnnnnnnnnnnnnnnnnnnnnnnnnnnnnnnnnnnnnnnnnnnnnnnnnnnnnnnnnnnnnnnnnnnnnnnnnnnnnnnnnnnnnnnnnnnnnnnnnnnnnnnnnnnnnnnnnnnnnnnnnnnnnnnnnnnnnnnnnnnnnnnnnnnnnnnnnnnnnnnnnnnnnnnnnnnnnnnnnnnnnnnnnnnnnnnnnnnnnnnnnnnnnnnnnnnnnnnnnnnnnnnnnnnnnnnnnnnnnnnnnnnnnnnnnnnnnnnnnnnnnnnnnnnnnnnnnnnnnnnnnnnnnnnnnnnnnnnnnnnnnnnnnnnnnnnnnnnnnnnnnnnnnnnnnnnnnnnnnnnnnnnnnnnnnnnnnnnnnnnnnnnnnnnnnnnnnnnnnnnnnnnnnnnnnnnnnnnnnnnnnnnnnnnnnnnnnnnnnnnnnnnnnnnnnnnnnnnnnnnnnnnnnnnnnnnnnnnnnnnnnnnnnnnnnnnnnnnnnnnnnnnnnnnnnnnnnnnnnnnnnnnnnnnnnnnnnnnnnnnnnnnnnnnnnnnnnnnnnnnnnnnnnnnnnnnnnnnnnnnnnnnnnnnnnnnnnnnnnnnnnnnnnnnnnnnnnnnnnnnnnnnnnnnnnnnnnnnnnnnnnnnnnnnnnnnnnnnnnnnnnnnnnnnnnnnnnnnnnnnnnnnnnnnnnnnnnnnnnnnnnnnnnnnnnnnnnnnnnnnnnnnnnnnnnnnnnnnnnnnnnnnnnnnnnnnnnnnnnnnnnnnnnnnnnnnnnnnnnnnnnnnnnnnnnnnnnnnnnnnnnnnnnnnnnnnnnnnnnnnnnnnnnnnnnnnnnnnnnnnnnnnnnnnnnnnnnnnnnnnnnnnnnnnnnnnnnnnnnnnnnnnnnnnnnnnnnnnnnnnnnnnnnnnnnnnnnnnnnnnnnnnnnnnnnnnnnnnnnnnnnnnnnnnnnnnnnnnnnnnnnnnnnnnnnnnnnnnnnnnnnnnnnnnnnnnnnnnnnnnnnnnnnnnnnnnnnnnnnnnnnnnnnnnnnnnnnnnnnnnnnnnnnnnnnnnnnnnnnnnnnnnnnnnnnnnnnnnnnnnnnnnnnnnnnnnnnnnnnnnnnnnnnnnnnnnnnnnnnnnnnnnnnnnnnnnnnnnnnnnnnnnnnnnnnnnnnnnnnnnnnnnnnnnnnnnnnnnnnnnnnnnnnnnnnnnnnnnnnnnnnnnnnnnnnnnnnnnnnnnnnnnnnnnnnnnnnnnnnnnnnnnnnnnnnnnnnnnnnnnnnnnnnnnnnnnnnnnnnnnnnnnnnnnnnnnnnnnnnnnnnnnnnnnnnnnnnnnnnnnnnnnnnnnnnnnnnnnnnnnnnnnnnnnnnnnnnnnnnnnnnnnnnnnnnnnnnnnnnnnnnnnnnnnnnnnnnnnnnnnnnnnnnnnnnnnnnnnnnnnnnnnnnnnnnnnnnnnnnnnnnnnnnnnnnnnnnnnnnnnnnnnnnnnnnnnnnnnnnnnnnnnnnnnnnnnnnnnnnnnnnnnnnnnnnnnnnnnnnnnnnnnnnnnnnnnnnnnnnnnnnnnnnnnnnnnnnnnnnnnnnnnnnnnnnnnnnnnnnnnnnnnnnnnnnnnnnnnnnnnnnnnnnnnnnnnnnnnnnnnnnnnnnnnnnnnnnnnnnnnnnnnnnnnnnnnnnnnnnnnnnnnnnnnnnnnnnnnnnnnnnnnnnnnnnnnnnnnnnnnnnnnnnnnnnnnnnnnnnnnnnnnnnnnnnnnnnnnnnnnnnnnnnnnnnnnnnnnnnnnnnnnnnnnnnnnnnnnnnnnnnnnnnnnnnnnnnnnnnnnnnnnnnnnnnnnnnnnnnnnnnnnnnnnnnnnnnnnnnnnnnnnnnnnnnnnnnnnnnnnnnnnnnnnnnnnnnnnnnnnnnnnnnnnnnnnnnnnnnnnnnnnnnnnnnnnnnnnnnnnnnnnnnnnnnnnnnnnnnnnnnnnnnnnnnnnnnnnnnnnnnnnnnnnnnnnnnnnnnnnnnnnnnnnnnnnnnnnnnnnnnnnnnnnnnnnnnnnnnnnnnnnnnnnnnnnnnnnnnnnnnnnnnnnnnnnnnnnnnnnnnnnnnnnnnnnnnnnnnnnnnnnnnnnnnnnnnnnnnnnnnnnnnnnnnnnnnnnnnnnnnnnnnnnnnnnnnnnnnnnnnnnnnnnnnnnnnnnnnnnnnnnnnnnnnnnnnnnnnnnnnnnnnnnnnnnnnnnnnnnnnnnnnnnnnnnnnnnnnnnnnnnnnnnnnnnnnnnnnnnnnnnnnnnnnnnnnnnnnnnnnnnnnnnnnnnnnnnnnnnnnnnnnnnnnnnnnnnnnnnnnnnnnnnnnnnnnnnnnnnnnnnnnnnnnnnnnnnnnnnnnnnnnnnnnnnnnnnnnnnnnnnnnnnnnnnnnnnnnnnnnnnnnnnnnnnnnnnnnnnnnnnnnnnnnnnnnnnnnnnnnnnnnnnnnnnnnnnnnnnnnnnnnnnnnnnnnnnnnnnnnnnnnnnnnnnnnnnnnnnnnnnnnnnnnnnnnnnnnnnnnnnnnnnnnnnnnnnnnnnnnnnnnnnnnnnnnnnnnnnnnnnnnnnnnnnnnnnnnnnnnnnnnnnnnnnnnnnnnnnnnnnnnnnnnnnnnnnnnnnnnnnnnnnnnnnnnnnnnnnnnnnnnnnnnnnnnnnnnnnnnnnnnnnnnnnnnnnnnnnnnnnnnnnnnnnnnnnnnnnnnnnnnnnnnnnnnnnnnnnnnnnnnnnnnnnnnnnnnnnnnnnnnnnnnnnnnnnnnnnnnnnnnnnnnnnnnnnnnnnnnnnnnnnnnnnnnnnnnnnnnnnnnnnnnnnnnnnnnnnnnnnnnnnnnnnnnnnnnnnnnnnnnnnnnnnnnnnnnnnnnnnnnnnnnnnnnnnnnnnnnnnnnnnnnnnnnnnnnnnnnnnnnnnnnnnnnnnnnnnnnnnnnnnnnnnnnnnnnnnnnnnnnnnnnnnnnnnnnnnnnnnnnnnnnnnnnnnnnnnnnnnnnnnnnnnnnnnnnnnnnnnnnnnnnnnnnnnnnnnnnnnnnnnnnnnnnnnnnnnnnnnnnnnnnnnnnnnnnnnnnnnnnnnnnnnnnnnnnnnnnnnnnnnnnnnnnnnnnnnnnnnnnnnnnnnnnnnnnnnnnnnnnnnnnnnnnnnnnnnnnnnnnnnnnnnnnnnnnnnnnnnnnnnnnnnnnnnnnnnnnnnnnnnnnnnnnnnnnnnnnnnnnnnnnnnnnnnnnnnnnnnnnnnnnnnnnnnnnnnnnnnnnnnnnnnnnnnnnnnnnnnnnnnnnnnnnnnnnnnnnnnnnnnnnnnnnnnnnnnnnnnnnnnnnnnnnnnnnnnnnnnnnnnnnnnnnnnnnnnnnnnnnnnnnnnnnnnnnnnnnnnnnnnnnnnnnnnnnnnnnnnnnnnnnnnnnnnnnnnnnnnnnnnnnnnnnnnnnnnnnnnnnnnnnnnnnnnnnnnnnnnnnnnnnnnnnnnnnnnnnnnnnnnnnnnnnnnnnnnnnnnnnnnnnnnnnnnnnnnnnnnnnnnnnnnnnnnnnnnnnnnnnnnnnnnnnnnnnnnnnnnnnnnnnnnnnnnnnnnnnnnnnnnnnnnnnnnnnnnnnnnnnnnnnnnnnnnnnnnnnnnnnnnnnnnnnnnnnnnnnnnnnnnnnnnnnnnnnnnnnnnnnnnnnnnnnnnnnnnnnnnnnnnnnnnnnnnnnnnnnnnnnnnnnnnnnnnnnnnnnnnnnnnnnnnnnnnnnnnnnnnnnnnnnnnnnnnnnnnnnnnnnnnnnnnnnnnnnnnnnnnnnnnnnnnnnnnnnnnnnnnnnnnnnnnnnnnnnnnnnnnnnnnnnnnnnnnnnnnnnnnnnnnnnnnnnnnnnnnnnnnnnnnnnnnnnnnnnnnnnnnnnnnnnnnnnnnnnnnnnnnnnnnnnnnnnnnnnnnnnnnnnnnnnnnnnnnnnnnnnnnnnnnnnnnnnnnnnnnnnnnnnnnnnnnnnnnnnnnnnnnnnnnnnnnnnnnnnnnnnnnnnnnnnnnnnnnnnnnnnnnnnnnnnnnnnnnnnnnnnnnnnnnnnnnnnnnnnnnnnnnnnnnnnnnnnnnnnnnnnnnnnnnnnnnnnnnnnnnnnnnnnnnnnnnnnnnnnnnnnnnnnnnnnnnnnnnnnnnnnnnnnnnnnnnnnnnnnnnnnnnnnnnnnnnnnnnnnnnnnnnnnnnnnnnnnnnnnnnnnnnnnnnnnnnnnnnnnnnnnnnnnnnnnnnnnnnnnnnnnnnnnnnnnnnnnnnnnnnnnnnnnnnnnnnnnnnnnnnnnnnnnnnnnnnnnnnnnnnnnnnnnnnnnnnnnnnnnnnnnnnnnnnnnnnnnnnnnnnnnnnnnnnnnnnnnnnnnnnnnnnnnnnnnnnnnnnnnnnnnnnnnnnnnnnnnnnnnnnnnnnnnnnnnnnnnnnnnnnnnnnnnnnnnnnnnnnnnnnnnnnnnnnnnnnnnnnnnnnnnnnnnnnnnnnnnnnnnnnnnnnnnnnnnnnnnnnnnnnnnnnnnnnnnnnnnnnnnnnnnnnnnnnnnnnnnnnnnnnnnnnnnnnnnnnnnnnnnnnnnnnnnnnnnnnnnnnnnnnnnnnnnnnnnnnnnnnnnnnnnnnnnnnnnnnnnnnnnnnnnnnnnnnnnnnnnnnnnnnnnnnnnnnnnnnnnnnnnnnnnnnnnnnnnnnnnnnnnnnnnnnnnnnnnnnnnnnnnnnnnnnnnnnnnnnnnnnnnnnnnnnnnnnnnnnnnnnnnnnnnnnnnnnnnnnnnnnnnnnnnnnnnnnnnnnnnnnnnnnnnnnnnnnnnnnnnnnnnnnnnnnnnnnnnnnnnnnnnnnnnnnnnnnnnnnnnnnnnnnnnnnnnnnnnnnnnnnnnnnnnnnnnnnnnnnnnnnnnnnnnnnnnnnnnnnnnnnnnnnnnnnnnnnnnnnnnnnnnnnnnnnnnnnnnnnnnnnnnnnnnnnnnnnnnnnnnnnnnnnnnnnnnnnnnnnnnnnnnnnnnnnnnnnnnnnnnnnnnnnnnnnnnnnnnnnnnnnnnnnnnnnnnnnnnnnnnnnnnnnnnnnnnnnnnnnnnnnnnnnnnnnnnnnnnnnnnnnnnnnnnnnnnnnnnnnnnnnnnnnnnnnnnnnnnnnnnnnnnnnnnnnnnnnnnnnnnnnnnnnnnnnnnnnnnnnnnnnnnnnnnnnnnnnnnnnnnnnnnnnnnnnnnnnnnnnnnnnnnnnnnnnnnnnnnnnnnnnnnnnnnnnnnnnnnnnnnnnnnnnnnnnnnnnnnnnnnnnnnnnnnnnnnnnnnnnnnnnnnnnnnnnnnnnnnnnnnnnnnnnnnnnnnnnnnnnnnnnnnnnnnnnnnnnnnnnnnnnnnnnnnnnnnnnnnnnnnnnnnnnnnnnnnnnnnnnnnnnnnnnnnnnnnnnnnnnnnnnnnnnnnnnnnnnnnnnnnnnnnnnnnnnnnnnnnnnnnnnnnnnnnnnnnnnnnnnnnnnnnnnnnnnnnnnnnnnnnnnnnnnnnnnnnnnnnnnnnnnnnnnnnnnnnnnnnnnnnnnnnnnnnnnnnnnnnnnnnnnnnnnnnnnnnnnnnnnnnnnnnnnnnnnnnnnnnnnnnnnnnnnnnnnnnnnnnnnnnnnnnnnnnnnnnnnnnnnnnnnnnnnnnnnnnnnnnnnnnnnnnnnnnnnnnnnnnnnnnnnnnnnnnnnnnnnnnnnnnnnnnnnnnnnnnnnnnnnnnnnnnnnnnnnnnnnnnnnnnnnnnnnnnnnnnnnnnnnnnnnnnnnnnnnnnnnnnnnnnnnnnnnnnnnnnnnnnnnnnnnnnnnnnnnnnnnnnnnnnnnnnnnnnnnnnnnnnnnnnnnnnnnnnnnnnnnnnnnnnnnnnnnnnnnnnnnnnnnnnnnnnnnnnnnnnnnnnnnnnnnnnnnnnnnnnnnnnnnnnnnnnnnnnnnnnnnnnnnnnnnnnnnnnnnnnnnnnnnnnnnnnnnnnnnnnnnnnnnnnnnnnnnnnnnnnnnnnnnnnnnnnnnnnnnnnnnnnnnnnnnnnnnnnnnnnnnnnnnnnnnnnnnnnnnnnnnnnnnnnnnnnnnnnnnnnnnnnnnnnnnnnnnnnnnnnnnnnnnnnnnnnnnnnnnnnnnnnnnnnnnnnnnnnnnnnnnnnnnnnnnnnnnnnnnnnnnnnnnnnnnnnnnnnnnnnnnnnnnnnnnnnnnnnnnnnnnnnnnnnnnnnnnnnnnnnnnnnnnnnnnnnnnnnnnnnnnnnnnnnnnnnnnnnnnnnnnnnnnnnnnnnnnnnnnnnnnnnnnnnnnnnnnnnnnnnnnnnnnnnnnnnnnnnnnnnnnnnnnnnnnnnnnnnnnnnnnnnnnnnnnnnnnnnnnnnnnnnnnnnnnnnnnnnnnnnnnnnnnnnnnnnnnnnnnnnnnnnnnnnnnnnnnnnnnnnnnnnnnnnnnnnnnnnnnnnnnnnnnnnnnnnnnnnnnnnnnnnnnnnnnnnnnnnnnnnnnnnnnnnnnnnnnnnnnnnnnnnnnnnnnnnnnnnnnnnnnnnnnnnnnnnnnnnnnnnnnnnnnnnnnnnnnnnnnnnnnnnnnnnnnnnnnnnnnnnnnnnnnnnnnnnnnnnnnnnnnnnnnnnnnnnnnnnnnnnnnnnnnnnnnnnnnnnnnnnnnnnnnnnnnnnnnnnnnnnnnnnnnnnnnnnnnnnnnnnnnnnnnnnnnnnnnnnnnnnnnnnnnnnnnnnnnnnnnnnnnnnnnnnnnnnnnnnnnnnnnnnnnnnnnnnnnnnnnnnnnnnnnnnnnnnnnnnnnnnnnnnnnnnnnnnnnnnnnnnnnnnnnnnnnnnnnnnnnnnnnnnnnnnnnnnnnnnnnnnnnnnnnnnnnnnnnnnnnnnnnnnnnnnnnnnnnnnnnnnnnnnnnnnnnnnnnnnnnnnnnnnnnnnnnnnnnnnnnnnnnnnnnnnnnnnnnnnnnnnnnnnnnnnnnnnnnnnnnnnnnnnnnnnnnnnnnnnnnnnnnnnnnnnnnnnnnnnnnnnnnnnnnnnnnnnnnnnnnnnnnnnnnnnnnnnnnnnnnnnnnnnnnnnnnnnnnnnnnnnnnnnnnnnnnnnnnnnnnnnnnnnnnnnnnnnnnnnnnnnnnnnnnnnnnnnnnnnnnnnnnnnnnnnnnnnnnnnnnnnnnnnnnnnnnnnnnnnnnnnnnnnnnnnnnnnnnnnnnnnnnnnnnnnnnnnnnnnnnnnnnnnnnnnnnnnnnnnnnnnnnnnnnnnnnnnnnnnnnnnnnnnnnnnnnnnnnnnnnnnnnnnnnnnnnnnnnnnnnnnnnnnnnnnnnnnnnnnnnnnnnnnnnnnnnnnnnnnnnnnnnnnnnnnnnnnnnnnnnnnnnnnnnnnnnnnnnnnnnnnnnnnnnnnnnnnnnnnnnnnnnnnnnnnnnnnnnnnnnnnnnnnnnnnnnnnnnnnnnnnnnnnnnnnnnnnnnnnnnnnnnnnnnnnnnnnnnnnnnnnnnnnnnnnnnnnnnnnnnnnnnnnnnnnnnnnnnnnnnnnnnnnnnnnnnnnnnnnnnnnnnnnnnnnnnnnnnnnnnnnnnnnnnnnnnnnnnnnnnnnnnnnnnnnnnnnnnnnnnnnnnnnnnnnnnnnnnnnnnnnnnnnnnnnnnnnnnnnnnnnnnnnnnnnnnnnnnnnnnnnnnnnnnnnnnnnnnnnnnnnnnnnnnnnnnnnnnnnnnnnnnnnnnnnnnnnnnnnnnnnnnnnnnnnnnnnnnnnnnnnnnnnnnnnnnnnnnnnnnnnnnnnnnnnnnnnnnnnnnnnnnnnnnnnnnnnnnnnnnnnnnnnnnnnnnnnnnnnnnnnnnnnnnnnnnnnnnnnnnnnnnnnnnnnnnnnnnnnnnnnnnnnnnnnnnnnnnnnnnnnnnnnnnnnnnnnnnnnnnnnnnnnnnnnnnnnnnnnnnnnnnnnnnnnnnnnnnnnnnnnnnnnnnnnnnnnnnnnnnnnnnnnnnnnnnnnnnnnnnnnnnnnnnnnnnnnnnnnnnnnnnnnnnnnnnnnnnnnnnnnnnnnnnnnnnnnnnnnnnnnnnnnnnnnnnnnnnnnnnnnnnnnnnnnnnnnnnnnnnnnnnnnnnnnnnnnnnnnnnnnnnnnnnnnnnnnnnnnnnnnnnnnnnnnnnnnnnnnnnnnnnnnnnnnnnnnnnnnnnnnnnnnnnnnnnnnnnnnnnnnnnnnnnnnnnnnnnnnnnnnnnnnnnnnnnnnnnnnnnnnnnnnnnnnnnnnnnnnnnnnnnnnnnnnnnnnnnnnnnnnnnnnnnnnnnnnnnnnnnnnnnnnnnnnnnnnnnnnnnnnnnnnnnnnnnnnnnnnnnnnnnnnnnnnnnnnnnnnnnnnnnnnnnnnnnnnnnnnnnnnnnnnnnnnnnnnnnnnnnnnnnnnnnnnnnnnnnnnnnnnnnnnnnnnnnnnnnnnnnnnnnnnnnnnnnnnnnnnnnnnnnnnnnnnnnnnnnnnnnnnnnnnnnnnnnnnnnnnnnnnnnnnnnnnnnnnnnnnnnnnnnnnnnnnnnnnnnnnnnnnnnnnnnnnnnnnnnnnnnnnnnnnnnnnnnnnnnnnnnnnnnnnnnnnnnnnnnnnnnnnnnnnnnnnnnnnnnnnnnnnnnnnnnnnnnnnnnnnnnnnnnnnnnnnnnnnnnnnnnnnnnnnnnnnnnnnnnnnnnnnnnnnnnnnnnnnnnnnnnnnnnnnnnnnnnnnnnnnnnnnnnnnnnnnnnnnnnnnnnnnnnnnnnnnnnnnnnnnnnnnnnnnnnnnnnnnnnnnnnnnnnnnnnnnnnnnnnnnnnnnnnnnnnnnnnnnnnnnnnnnnnnnnnnnnnnnnnnnnnnnnnnnnnnnnnnnnnnnnnnnnnnnnnnnnnnnnnnnnnnnnnnnnnnnnnnnnnnnnnnnnnnnnnnnnnnnnnnnnnnnnnnnnnnnnnnnnnnnnnnnnnnnnnnnnnnnnnnnnnnnnnnnnnnnnnnnnnnnnnnnnnnnnnnnnnnnnnnnnnnnnnnnnnnnnnnnnnnnnnnnnnnnnnnnnnnnnnnnnnnnnnnnnnnnnnnnnnnnnnnnnnnnnnnnnnnnnnnnnnnnnnnnnnnnnnnnnnnnnnnnnnnnnnnnnnnnnnnnnnnnnnnnnnnnnnnnnnnnnnnnnnnnnnnnnnnnnnnnnnnnnnnnnnnnnnnnnnnnnnnnnnnnnnnnnnnnnnnnnnnnnnnnnnnnnnnnnnnnnnnnnnnnnnnnnnnnnnnnnnnnnnnnnnnnnnnnnnnnnnnnnnnnnnnnnnnnnnnnnnnnnnnnnnnnnnnnnnnnnnnnnnnnnnnnnnnnnnnnnnnnnnnnnnnnnnnnnnnnnnnnnnnnnnnnnnnnnnnnnnnnnnnnnnnnnnnnnnnnnnnnnnnnnnnnnnnnnnnnnnnnnnnnnnnnnnnnnnnnnnnnnnnnnnnnnnnnnnnnnnnnnnnnnnnnnnnnnnnnnnnnnnnnnnnnnnnnnnnnnnnnnnnnnnnnnnnnnnnnnnnnnnnnnnnnnnnnnnnnnnnnnnnnnnnnnnnnnnnnnnnnnnnnnnnnnnnnnnnnnnnnnnnnnnnnnnnnnnnnnnnnnnnnnnnnnnnnnnnnnnnnnnnnnnnnnnnnnnnnnnnnnnnnnnnnnnnnnnnnnnnnnnnnnnnnnnnnnnnnnnnnnnnnnnnnnnnnnnnnnnnnnnnnnnnnnnnnnnnnnnnnnnnnnnnnnnnnnnnnnnnnnnnnnnnnnnnnnnnnnnnnnnnnnnnnnnnnnnnnnnnnnnnnnnnnnnnnnnnnnnnnnnnnnnnnnnnnnnnnnnnnnnnnnnnnnnnnnnnnnnnnnnnnnnnnnnnnnnnnnnnnnnnnnnnnnnnnnnnnnnnnnnnnnnnnnnnnnnnnnnnnnnnnnnnnnnnnnnnnnnnnnnnnnnnnnnnnnnnnnnnnnnnnnnnnnnnnnnnnnnnnnnnnnnnnnnnnnnnnnnnnnnnnnnnnnnnnnnnnnnnnnnnnnnnnnnnnnnnnnnnnnnnnnnnnnnnnnnnnnnnnnnnnnnnnnnnnnnnnnnnnnnnnnnnnnnnnnnnnnnnnnnnnnnnnnnnnnnnnnnnnnnnnnnnnnnnnnnnnnnnnnnnnnnnnnnnnnnnnnnnnnnnnnnnnnnnnnnnnnnnnnnnnnnnnnnnnnnnnnnnnnnnnnnnnnnnnnnnnnnnnnnnnnnnnnnnnnnnnnnnnnnnnnnnnnnnnnnnnnnnnnnnnnnnnnnnnnnnnnnnnnnnnnnnnnnnnnnnnnnnnnnnnnnnnnnnnnnnnnnnnnnnnnnnnnnnnnnnnnnnnnnnnnnnnnnnnnnnnnnnnnnnnnnnnnnnnnnnnnnnnnnnnnnnnnnnnnnnnnnnnnnnnnnnnnnnnnnnnnnnnnnnnnnnnnnnnnnnnnnnnnnnnnnnnnnnnnnnnnnnnnnnnnnnnnnnnnnnnnnnnnnnnnnnnnnnnnnnnnnnnnnnnnnnnnnnnnnnnnnnnnnnnnnnnnnnnnnnnnnnnnnnnnnnnnnnnnnnnnnnnnnnnnnnnnnnnnnnnnnnnnnnnnnnnnnnnnnnnnnnnnnnnnnnnnnnnnnnnnnnnnnnnnnnnnnnnnnnnnnnnnnnnnnnnnnnnnnnnnnnnnnnnnnnnnnnnnnnnnnnnnnnnnnnnnnnnnnnnnnnnnnnnnnnnnnnnnnnnnnnnnnnnnnnnnnnnnnnnnnnnnnnnnnnnnnnnnnnnnnnnnnnnnnnnnnnnnnnnnnnnnnnnnnnnnnnnnnnnnnnnnnnnnnnnnnnnnnnnnnnnnnnnnnnnnnnnnnnnnnnnnnnnnnnnnnnnnnnnnnnnnnnnnnnnnnnnnnnnnnnnnnnnnnnnnnnnnnnnnnnnnnnnnnnnnnnnnnnnnnnnnnnnnnnnnnnnnnnnnnnnnnnnnnnnnnnnnnnnnnnnnnnnnnnnnnnnnnnnnnnnnnnnnnnnnnnnnnnnnnnnnnnnnnnnnnnnnnnnnnnnnnnnnnnnnnnnnnnnnnnnnnnnnnnnnnnnnnnnnnnnnnnnnnnnnnnnnnnnnnnnnnnnnnnnnnnnnnnnnnnnnnnnnnnnnnnnnnnnnnnnnnnnnnnnnnnnnnnnnnnnnnnnnnnnnnnnnnnnnnnnnnnnnnnnnnnnnnnnnnnnnnnnnnnnnnnnnnnnnnnnnnnnnnnnnnnnnnnnnnnnnnnnnnnnnnnnnnnnnnnnnnnnnnnnnnnnnnnnnnnnnnnnnnnnnnnnnnnnnnnnnnnnnnnnnnnnnnnnnnnnnnnnnnnnnnnnnnnnnnnnnnnnnnnnnnnnnnnnnnnnnnnnnnnnnnnnnnnnnnnnnnnnnnnnnnnnnnnnnnnnnnnnnnnnnnnnnnnnnnnnnnnnnnnnnnnnnnnnnnnnnnnnnnnnnnnnnnnnnnnnnnnnnnnnnnnnnnnnnnnnnnnnnnnnnnnnnnnnnnnnnnnnnnnnnnnnnnnnnnnnnnnnnnnnnnnnnnnnnnnnnnnnnnnnnnnnnnnnnnnnnnnnnnnnnnnnnnnnnnnnnnnnnnnnnnnnnnnnnnnnnnnnnnnnnnnnnnnnnnnnnnnnnnnnnnnnnnnnnnnnnnnnnnnnnnnnnnnnnnnnnnnnnnnnnnnnnnnnnnnnnnnnnnnnnnnnnnnnnnnnnnnnnnnnnnnnnnnnnnnnnnnnnnnnnnnnnnnnnnnnnnnnnnnnnnnnnnnnnnnnnnnnnnnnnnnnnnnnnnnnnnnnnnnnnnnnnnnnnnnnnnnnnnnnnnnnnnnnnnnnnnnnnnnnnnnnnnnnnnnnnnnnnnnnnnnnnnnnnnnnnnnnnnnnnnnnnnnnnnnnnnnnnnnnnnnnnnnnnnnnnnnnnnnnnnnnnnnnnnnnnnnnnnnnnnnnnnnnnnnnnnnnnnnnnnnnnnnnnnnnnnnnnnnnnnnnnnnnnnnnnnnnnnnnnnnnnnnnnnnnnnnnnnnnnnnnnnnnnnnnnnnnnnnnnnnnnnnnnnnnnnnnnnnnnnnnnnnnnnnnnnnnnnnnnnnnnnnnnnnnnnnnnnnnnnnnnnnnnnnnnnnnnnnnnnnnnnnnnnnnnnnnnnnnnnnnnnnnnnnnnnnnnnnnnnnnnnnnnnnnnnnnnnnnnnnnnnnnnnnnnnnnnnnnnnnnnnnnnnnnnnnnnnnnnnnnnnnnnnnnnnnnnnnnnnnnnnnnnnnnnnnnnnnnnnnnnnnnnnnnnnnnnnnnnnnnnnnnnnnnnnnnnnnnnnnnnnnnnnnnnnnnnnnnnnnnnnnnnnnnnnnnnnnnnnnnnnnnnnnnnnnnnnnnnnnnnnnnnnnnnnnnnnnnnnnnnnnnnnnnnnnnnnnnnnnnnnnnnnnnnnnnnnnnnnnnnnnnnnnnnnnnnnnnnnnnnnnnnnnnnnnnnnnnnnnnnnnnnnnnnnnnnnnnnnnnnnnnnnnnnnnnnnnnnnnnnnnnnnnnnnnnnnnnnnnnnnnnnnnnnnnnnnnnnnnnnnnnnnnnnnnnnnnnnnnnnnnnnnnnnnnnnnnnnnnnnnnnnnnnnnnnnnnnnnnnnnnnnnnnnnnnnnnnnnnnnnnnnnnnnnnnnnnnnnnnnnnnnnnnnnnnnnnnnnnnnnnnnnnnnnnnnnnnnnnnnnnnnnnnnnnnnnnnnnnnnnnnnnnnnnnnnnnnnnnnnnnnnnnnnnnnnnnnnnnnnnnnnnnnnnnnnnnnnnnnnnnnnnnnnnnnnnnnnnnnnnnnnnnnnnnnnnnnnnnnnnnnnnnnnnnnnnnnnnnnnnnnnnnnnnnnnnnnnnnnnnnnnnnnnnnnnnnnnnnnnnnnnnnnnnnnnnnnnnnnnnnnnnnnnnnnnnnnnnnnnnnnnnnnnnnnnnnnnnnnnnnnnnnnnnnnnnnnnnnnnnnnnnnnnnnnnnnnnnnnnnnnnnnnnnnnnnnnnnnnnnnnnnnnnnnnnnnnnnnnnnnnnnnnnnnnnnnnnnnnnnnnnnnnnnnnnnnnnnnnnnnnnnnnnnnnnnnnnnnnnnnnnnnnnnnnnnnnnnnnnnnnnnnnnnnnnnnnnnnnnnnnnnnnnnnnnnnnnnnnnnnnnnnnnnnnnnnnnnnnnnnnnnnnnnnnnnnnnnnnnnnnnnnnnnnnnnnnnnnnnnnnnnnnnnnnnnnnnnnnnnnnnnnnnnnnnnnnnnnnnnnnnnnnnnnnnnnnnnnnnnnnnnnnnnnnnnnnnnnnnnnnnnnnnnnnnnnnnnnnnnnnnnnnnnnnnnnnnnnnnnnnnnnnnnnnnnnnnnnnnnnnnnnnnnnnnnnnnnnnnnnnnnnnnnnnnnnnnnnnnnnnnnnnnnnnnnnnnnnnnnnnnnnnnnnnnnnnnnnnnnnnnnnnnnnnnnnnnnnnnnnnnnnnnnnnnnnnnnnnnnnnnnnnnnnnnnnnnnnnnnnnnnnnnnnnnnnnnnnnnnnnnnnnnnnnnnnnnnnnnnnnnnnnnnnnnnnnnnnnnnnnnnnnnnnnnnnnnnnnnnnnnnnnnnnnnnnnnnnnnnnnnnnnnnnnnnnnnnnnnnnnnnnnnnnnnnnnnnnnnnnnnnnnnnnnnnnnnnnnnnnnnnnnnnnnnnnnnnnnnnnnnnnnnnnnnnnnnnnnnnnnnnnnnnnnnnnnnnnnnnnnnnnnnnnnnnnnnnnnnnnnnnnnnnnnnnnnnnnnnnnnnnnnnnnnnnnnnnnnnnnnnnnnnnnnnnnnnnnnnnnnnnnnnnnnnnnnnnnnnnnnnnnnnnnnnnnnnnnnnnnnnnnnnnnnnnnnnnnnnnnnnnnnnnnnnnnnnnnnnnnnnnnnnnnnnnnnnnnnnnnnnnnnnnnnnnnnnnnnnnnnnnnnnnnnnnnnnnnnnnnnnnnnnnnnnnnnnnnnnnnnnnnnnnnnnnnnnnnnnnnnnnnnnnnnnnnnnnnnnnnnnnnnnnnnnnnnnnnnnnnnnnnnnnnnnnnnnnnnnnnnnnnnnnnnnnnnnnnnnnnnnnnnnnnnnnnnnnnnnnnnnnnnnnnnnnnnnnnnnnnnnnnnnnnnnnnnnnnnnnnnnnnnnnnnnnnnnnnnnnnnnnnnnnnnnnnnnnnnnnnnnnnnnnnnnnnnnnnnnnnnnnnnnnnnnnnnnnnnnnnnnnnnnnnnnnnnnnnnnnnnnnnnnnnnnnnnnnnnnnnnnnnnnnnnnnnnnnnnnnnnnnnnnnnnnnnnnnnnnnnnnnnnnnnnnnnnnnnnnnnnnnnnnnnnnnnnnnnnnnnnnnnnnnnnnnnnnnnnnnnnnnnnnnnnnnnnnnnnnnnnnnnnnnnnnnnnnnnnnnnnnnnnnnnnnnnnnnnnnnnnnnnnnnnnnnnnnnnnnnnnnnnnnnnnnnnnnnnnnnnnnnnnnnnnnnnnnnnnnnnnnnnnnnnnnnnnnnnnnnnnnnnnnnnnnnnnnnnnnnnnnnnnnnnnnnnnnnnnnnnnnnnnnnnnnnnnnnnnnnnnnnnnnnnnnnnnnnnnnnnnnnnnnnnnnnnnnnnnnnnnnnnnnnnnnnnnnnnnnnnnnnnnnnnnnnnnnnnnnnnnnnnnnnnnnnnnnnnnnnnnnnnnnnnnnnnnnnnnnnnnnnnnnnnnnnnnnnnnnnnnnnnnnnnnnnnnnnnnnnnnnnnnnnnnnnnnnnnnnnnnnnnnnnnnnnnnnnnnnnnnnnnnnnnnnnnnnnnnnnnnnnnnnnnnnnnnnnnnnnnnnnnnnnnnnnnnnnnnnnnnnnnnnnnnnnnnnnnnnnnnnnnnnnnnnnnnnnnnnnnnnnnnnnnnnnnnnnnnnnnnnnnnnnnnnnnnnnnnnnnnnnnnnnnnnnnnnnnnnnnnnnnnnnnnnnnnnnnnnnnnnnnnnnnnnnnnnnnnnnnnnnnnnnnnnnnnnnnnnnnnnnnnnnnnnnnnnnnnnnnnnnnnnnnnnnnnnnnnnnnnnnnnnnnnnnnnnnnnnnnnnnnnnnnnnnnnnnnnnnnnnnnnnnnnnnnnnnnnnnnnnnnnnnnnnnnnnnnnnnnnnnnnnnnnnnnnnnnnnnnnnnnnnnnnnnnnnnnnnnnnnnnnnnnnnnnnnnnnnnnnnnnnnnnnnnnnnnnnnnnnnnnnnnnnnnnnnnnnnnnnnnnnnnnnnnnnnnnnnnnnnnnnnnnnnnnnnnnnnnnnnnnnnnnnnnnnnnnnnnnnnnnnnnnnnnnnnnnnnnnnnnnnnnnnnnnnnnnnnnnnnnnnnnnnnnnnnnnnnnnnnnnnnnnnnnnnnnnnnnnnnnnnnnnnnnnnnnnnnnnnnnnnnnnnnnnnnnnnnnnnnnnnnnnnnnnnnnnnnnnnnnnnnnnnnnnnnnnnnnnnnnnnnnnnnnnnnnnnnnnnnnnnnnnnnnnnnnnnnnnnnnnnnnnnnnnnnnnnnnnnnnnnnnnnnnnnnnnnnnnnnnnnnnnnnnnnnnnnnnnnnnnnnnnnnnnnnnnnnnnnnnnnnnnnnnnnnnnnnnnnnnnnnnnnnnnnnnnnnnnnnnnnnnnnnnnnnnnnnnnnnnnnnnnnnnnnnnnnnnnnnnnnnnnnnnnnnnnnnnnnnnnnnnnnnnnnnnnnnnnnnnnnnnnnnnnnnnnnnnnnnnnnnnnnnnnnnnnnnnnnnnnnnnnnnnnnnnnnnnnnnnnnnnnnnnnnnnnnnnnnnnnnnnnnnnnnnnnnnnnnnnnnnnnnnnnnnnnnnnnnnnnnnnnnnnnnnnnnnnnnnnnnnnnnnnnnnnnnnnnnnnnnnnnnnnnnnnnnnnnnnnnnnnnnnnnnnnnnnnnnnnnnnnnnnnnnnnnnnnnnnnnnnnnnnnnnnnnnnnnnnnnnnnnnnnnnnnnnnnnnnnnnnnnnnnnnnnnnnnnnnnnnnnnnnnnnnnnnnnnnnnnnnnnnnnnnnnnnnnnnnnnnnnnnnnnnnnnnnnnnnnnnnnnnnnnnnnnnnnnnnnnnnnnnnnnnnnnnnnnnnnnnnnnnnnnnnnnnnnnnnnnnnnnnnnnnnnnnnnnnnnnnnnnnnnnnnnnnnnnnnnnnnnnnnnnnnnnnnnnnnnnnnnnnnnnnnnnnnnnnnnnnnnnnnnnnnnnnnnnnnnnnnnnnnnnnnnnnnnnnnnnnnnnnnnnnnnnnnnnnnnnnnnnnnnnnnnnnnnnnnnnnnnnnnnnnnnnnnnnnnnnnnnnnnnnnnnnnnnnnnnnnnnnnnnnnnnnnnnnnnnnnnnnnnnnnnnnnnnnnnnnnnnnnnnnnnnnnnnnnnnnnnnnnnnnnnnnnnnnnnnnnnnnnnnnnnnnnnnnnnnnnnnnnnnnnnnnnnnnnnnnnnnnnnnnnnnnnnnnnnnnnnnnnnnnnnnnnnnnnnnnnnnnnnnnnnnnnnnnnnnnnnnnnnnnnnnnnnnnnnnnnnnnnnnnnnnnnnnnnnnnnnnnnnnnnnnnnnnnnnnnnnnnnnnnnnnnnnnnnnnnnnnnnnnnnnnnnnnnnnnnnnnnnnnnnnnnnnnnnnnnnnnnnnnnnnnnnnnnnnnnnnnnnnnnnnnnnnnnnnnnnnnnnnnnnnnnnnnnnnnnnnnnnnnnnnnnnnnnnnnnnnnnnnnnnnnnnnnnnnnnnnnnnnnnnnnnnnnnnnnnnnnnnnnnnnnnnnnnnnnnnnnnnnnnnnnnnnnnnnnnnnnnnnnnnnnnnnnnnnnnnnnnnnnnnnnnnnnnnnnnnnnnnnnnnnnnnnnnnnnnnnnnnnnnnnnnnnnnnnnnnnnnnnnnnnnnnnnnnnnnnnnnnnnnnnnnnnnnnnnnnnnnnnnnnnnnnnnnnnnnnnnnnnnnnnnnnnnnnnnnnnnnnnnnnnnnnnnnnnnnnnnnnnnnnnnnnnnnnnnnnnnnnnnnnnnnnnnnnnnnnnnnnnnnnnnnnnnnnnnnnnnnnnnnnnnnnnnnnnnnnnnnnnnnnnnnnnnnnnnnnnnnnnnnnnnnnnnnnnnnnnnnnnnnnnnnnnnnnnnnnnnnnnnnnnnnnnnnnnnnnnnnnnnnnnnnnnnnnnnnnnnnnnnnnnnnnnnnnnnnnnnnnnnnnnnnnnnnnnnnnnnnnnnnnnnnnnnnnnnnnnnnnnnnnnnnnnnnnnnnnnnnnnnnnnnnnnnnnnnnnnnnnnnnnnnnnnnnnnnnnnnnnnnnnnnnnnnnnnnnnnnnnnnnnnnnnnnnnnnnnnnnnnnnnnnnnnnnnnnnnnnnnnnnnnnnnnnnnnnnnnnnnnnnnnnnnnnnnnnnnnnnnnnnnnnnnnnnnnnnnnnnnnnnnnnnnnnnnnnnnnnnnnnnnnnnnnnnnnnnnnnnnnnnnnnnnnnnnnnnnnnnnnnnnnnnnnnnnnnnnnnnnnnnnnnnnnnnnnnnnnnnnnnnnnnnnnnnnnnnnnnnnnnnnnnnnnnnnnnnnnnnnnnnnnnnnnnnnnnnnnnnnnnnnnnnnnnnnnnnnnnnnnnnnnnnnnnnnnnnnnnnnnnnnnnnnnnnnnnnnnnnnnnnnnnnnnnnnnnnnnnnnnnnnnnnnnnnnnnnnnnnnnnnnnnnnnnnnnnnnnnnnnnnnnnnnnnnnnnnnnnnnnnnnnnnnnnnnnnnnnnnnnnnnnnnnnnnnnnnnnnnnnnnnnnnnnnnnnnnnnnnnnnnnnnnnnnnnnnnnnnnnnnnnnnnnnnnnnnnnnnnnnnnnnnnnnnnnnnnnnnnnnnnnnnnnnnnnnnnnnnnnnnnnnnnnnnnnnnnnnnnnnnnnnnnnnnnnnnnnnnnnnnnnnnnnnnnnnnnnnnnnnnnnnnnnnnnnnnnnnnnnnnnnnnnnnnnnnnnnnnnnnnnnnnnnnnnnnnnnnnnnnnnnnnnnnnnnnnnnnnnnnnnnnnnnnnnnnnnnnnnnnnnnnnnnnnnnnnnnnnnnnnnnnnnnnnnnnnnnnnnnnnnnnnnnnnnnnnnnnnnnnnnnnnnnnnnnnnnnnnnnnnnnnnnnnnnnnnnnnnnnnnnnnnnnnnnnnnnnnnnnnnnnnnnnnnnnnnnnnnnnnnnnnnnnnnnnnnnnnnnnnnnnnnnnnnnnnnnnnnnnnnnnnnnnnnnnnnnnnnnnnnnnnnnnnnnnnnnnnnnnnnnnnnnnnnnnnnnnnnnnnnnnnnnnnnnnnnnnnnnnnnnnnnnnnnnnnnnnnnnnnnnnnnnnnnnnnnnnnnnnnnnnnnnnnnnnnnnnnnnnnnnnnnnnnnnnnnnnnnnnnnnnnnnnnnnnnnnnnnnnnnnnnnnnnnnnnnnnnnnnnnnnnnnnnnnnnnnnnnnnnnnnnnnnnnnnnnnnnnnnnnnnnnnnnnnnnnnnnnnnnnnnnnnnnnnnnnnnnnnnnnnnnnnnnnnnnnnnnnnnnnnnnnnnnnnnnnnnnnnnnnnnnnnnnnnnnnnnnnnnnnnnnnnnnnnnnnnnnnnnnnnnnnnnnnnnnnnnnnnnnnnnnnnnnnnnnnnnnnnnnnnnnnnnnnnnnnnnnnnnnnnnnnnnnnnnnnnnnnnnnnnnnnnnnnnnnnnnnnnnnnnnnnnnnnnnnnnnnnnnnnnnnnnnnnnnnnnnnnnnnnnnnnnnnnnnnnnnnnnnnnnnnnnnnnnnnnnnnnnnnnnnnnnnnnnnnnnnnnnnnnnnnnnnnnnnnnnnnnnnnnnnnnnnnnnnnnnnnnnnnnnnnnnnnnnnnnnnnnnnnnnnnnnnnnnnnnnnnnnnnnnnnnnnnnnnnnnnnnnnnnnnnnnnnnnnnnnnnnnnnnnnnnnnnnnnnnnnnnnnnnnnnnnnnnnnnnnnnnnnnnnnnnnnnnnnnnnnnnnnnnnnnnnnnnnnnnnnnnnnnnnnnnnnnnnnnnnnnnnnnnnnnnnnnnnnnnnnnnnnnnnnnnnnnnnnnnnnnnnnnnnnnnnnnnnnnnnnnnnnnnnnnnnnnnnnnnnnnnnnnnnnnnnnnnnnnnnnnnnnnnnnnnnnnnnnnnnnnnnnnnnnnnnnnnnnnnnnnnnnnnnnnnnnnnnnnnnnnnnnnnnnnnnnnnnnnnnnnnnnnnnnnnnnnnnnnnnnnnnnnnnnnnnnnnnnnnnnnnnnnnnnnnnnnnnnnnnnnnnnnnnnnnnnnnnnnnnnnnnnnnnnnnnnnnnnnnnnnnnnnnnnnnnnnnnnnnnnnnnnnnnnnnnnnnnnnnnnnnnnnnnnnnnnnnnnnnnnnnnnnnnnnnnnnnnnnnnnnnnnnnnnnnnnnnnnnnnnnnnnnnnnnnnnnnnnnnnnnnnnnnnnnnnnnnnnnnnnnnnnnnnnnnnnnnnnnnnnnnnnnnnnnnnnnnnnnnnnnnnnnnnnnnnnnnnnnnnnnnnnnnnnnnnnnnnnnnnnnnnnnnnnnnnnnnnnnnnnnnnnnnnnnnnnnnnnnnnnnnnnnnnnnnnnnnnnnnnnnnnnnnnnnnnnnnnnnnnnnnnnnnnnnnnnnnnnnnnnnnnnnnnnnnnnnnnnnnnnnnnnnnnnnnnnnnnnnnnnnnnnnnnnnnnnnnnnnnnnnnnnnnnnnnnnnnnnnnnnnnnnnnnnnnnnnnnnnnnnnnnnnnnnnnnnnnnnnnnnnnnnnnnnnnnnnnnnnnnnnnnnnnnnnnnnnnnnnnnnnnnnnnnnnnnnnnnnnnnnnnnnnnnnnnnnnnnnnnnnnnnnnnnnnnnnnnnnnnnnnnnnnnnnnnnnnnnnnnnnnnnnnnnnnnnnnnnnnnnnnnnnnnnnnnnnnnnnnnnnnnnnnnnnnnnnnnnnnnnnnnnnnnnnnnnnnnnnnnnnnnnnnnnnnnnnnnnnnnnnnnnnnnnnnnnnnnnnnnnnnnnnnnnnnnnnnnnnnnnnnnnnnnnnnnnnnnnnnnnnnnnnnnnnnnnnnnnnnnnnnnnnnnnnnnnnnnnnnnnnnnnnnnnnnnnnnnnnnnnnnnnnnnnnnnnnnnnnnnnnnnnnnnnnnnnnnnnnnnnnnnnnnnnnnnnnnnnnnnnnnnnnnnnnnnnnnnnnnnnnnnnnnnnnnnnnnnnnnnnnnnnnnnnnnnnnnnnnnnnnnnnnnnnnnnnnnnnnnnnnnnnnnnnnnnnnnnnnnnnnnnnnnnnnnnnnnnnnnnnnnnnnnnnnnnnnnnnnnnnnnnnnnnnnnnnnnnnnnnnnnnnnnnnnnnnnnnnnnnnnnnnnnnnnnnnnnnnnnnnnnnnnnnnnnnnnnnnnnnnnnnnnnnnnnnnnnnnnnnnnnnnnnnnnnnnnnnnnnnnnnnnnnnnnnnnnnnnnnnnnnnnnnnnnnnnnnnnnnnnnnnnnnnnnnnnnnnnnnnnnnnnnnnnnnnnnnnnnnnnnnnnnnnnnnnnnnnnnnnnnnnnnnnnnnnnnnnnnnnnnnnnnnnnnnnnnnnnnnnnnnnnnnnnnnnnnnnnnnnnnnnnnnnnnnnnnnnnnnnnnnnnnnnnnnnnnnnnnnnnnnnnnnnnnnnnnnnnnnnnnnnnnnnnnnnnnnnnnnnnnnnnnnnnnnnnnnnnnnnnnnnnnnnnnnnnnnnnnnnnnnnnnnnnnnnnnnnnnnnnnnnnnnnnnnnnnnnnnnnnnnnnnnnnnnnnnnnnnnnnnnnnnnnnnnnnnnnnnnnnnnnnnnnnnnnnnnnnnnnnnnnnnnnnnnnnnnnnnnnnnnnnnnnnnnnnnnnnnnnnnnnnnnnnnnnnnnnnnnnnnnnnnnnnnnnnnnnnnnnnnnnnnnnnnnnnnnnnnnnnnnnnnnnnnnnnnnnnnnnnnnnnnnnnnnnnnnnnnnnnnnnnnnnnnnnnnnnnnnnnnnnnnnnnnnnnnnnnnnnnnnnnnnnnnnnnnnnnnnnnnnnnnnnnnnnnnnnnnnnnnnnnnnnnnnnnnnnnnnnnnnnnnnnnnnnnnnnnnnnnnnnnnnnnnnnnnnnnnnnnnnnnnnnnnnnnnnnnnnnnnnnnnnnnnnnnnnnnnnnnnnnnnnnnnnnnnnnnnnnnnnnnnnnnnnnnnnnnnnnnnnnnnnnnnnnnnnnnnnnnnnnnnnnnnnnnnnnnnnnnnnnnnnnnnnnnnnnnnnnnnnnnnnnnnnnnnnnnnnnnnnnnnnnnnnnnnnnnnnnnnnnnnnnnnnnnnnnnnnnnnnnnnnnnnnnnnnnnnnnnnnnnnnnnnnnnnnnnnnnnnnnnnnnnnnnnnnnnnnnnnnnnnnnnnnnnnnnnnnnnnnnnnnnnnnnnnnnnnnnnnnnnnnnnnnnnnnnnnnnnnnnnnnnnnnnnnnnnnnnnnnnnnnnnnnnnnnnnnnnnnnnnnnnnnnnnnnnnnnnnnnnnnnnnnnnnnnnnnnnnnnnnnnnnnnnnnnnnnnnnnnnnnnnnnnnnnnnnnnnnnnnnnnnnnnnnnnnnnnnnnnnnnnnnnnnnnnnnnnnnnnnnnnnnnnnnnnnnnnnnnnnnnnnnnnnnnnnnnnnnnnnnnnnnnnnnnnnnnnnnnnnnnnnnnnnnnnnnnnnnnnnnnnnnnnnnnnnnnnnnnnnnnnnnnnnnnnnnnnnnnnnnnnnnnnnnnnnnnnnnnnnnnnnnnnnnnnnnnnnnnnnnnnnnnnnnnnnnnnnnnnnnnnnnnnnnnnnnnnnnnnnnnnnnnnnnnnnnnnnnnnnnnnnnnnnnnnnnnnnnnnnnnnnnnnnnnnnnnnnnnnnnnnnnnnnnnnnnnnnnnnnnnnnnnnnnnnnnnnnnnnnnnnnnnnnnnnnnnnnnnnnnnnnnnnnnnnnnnnnnnnnnnnnnnnnnnnnnnnnnnnnnnnnnnnnnnnnnnnnnnnnnnnnnnnnnnnnnnnnnnnnnnnnnnnnnnnnnnnnnnnnnnnnnnnnnnnnnnnnnnnnnnnnnnnnnnnnnnnnnnnnnnnnnnnnnnnnnnnnnnnnnnnnnnnnnnnnnnnnnnnnnnnnnnnnnnnnnnnnnnnnnnnnnnnnnnnnnnnnnnnnnnnnnnnnnnnnnnnnnnnnnnnnnnnnnnnnnnnnnnnnnnnnnnnnnnnnnnnnnnnnnnnnnnnnnnnnnnnnnnnnnnnnnnnnnnnnnnnnnnnnnnnnnnnnnnnnnnnnnnnnnnnnnnnnnnnnnnnnnnnnnnnnnnnnnnnnnnnnnnnnnnnnnnnnnnnnnnnnnnnnnnnnnnnnnnnnnnnnnnnnnnnnnnnnnnnnnnnnnnnnnnnnnnnnnnnnnnnnnnnnnnnnnnnnnnnnnnnnnnnnnnnnnnnnnnnnnnnnnnnnnnnnnnnnnnnnnnnnnnnnnnnnnnnnnnnnnnnnnnnnnnnnnnnnnnnnnnnnnnnnnnnnnnnnnnnnnnnnnnnnnnnnnnnnnnnnnnnnnnnnnnnnnnnnnnnnnnnnnnnnnnnnnnnnnnnnnnnnnnnnnnnnnnnnnnnnnnnnnnnnnnnnnnnnnnnnnnnnnnnnnnnnnnnnnnnnnnnnnnnnnnnnnnnnnnnnnnnnnnnnnnnnnnnnnnnnnnnnnnnnnnnnnnnnnnnnnnnnnnnnnnnnnnnnnnnnnnnnnnnnnnnnnnnnnnnnnnnnnnnnnnnnnnnnnnnnnnnnnnnnnnnnnnnnnnnnnnnnnnnnnnnnnnnnnnnnnnnnnnnnnnnnnnnnnnnnnnnnnnnnnnnnnnnnnnnnnnnnnnnnnnnnnnnnnnnnnnnnnnnnnnnnnnnnnnnnnnnnnnnnnnnnnnnnnnnnnnnnnnnnnnnnnnnnnnnnnnnnnnnnnnnnnnnnnnnnnnnnnnnnnnnnnnnnnnnnnnnnnnnnnnnnnnnnnnnnnnnnnnnnnnnnnnnnnnnnnnnnnnnnnnnnnnnnnnnnnnnnnnnnnnnnnnnnnnnnnnnnnnnnnnnnnnnnnnnnnnnnnnnnnnnnnnnnnnnnnnnnnnnnnnnnnnnnnnnnnnnnnnnnnnnnnnnnnnnnnnnnnnnnnnnnnnnnnnnnnnnnnnnnnnnnnnnnnnnnnnnnnnnnnnnnnnnnnnnnnnnnnnnnnnnnnnnnnnnnnnnnnnnnnnnnnnnnnnnnnnnnnnnnnnnnnnnnnnnnnnnnnnnnnnnnnnnnnnnnnnnnnnnnnnnnnnnnnnnnnnnnnnnnnnnnnnnnnnnnnnnnnnnnnnnnnnnnnnnnnnnnnnnnnnnnnnnnnnnnnnnnnnnnnnnnnnnnnnnnnnnnnnnnnnnnnnnnnnnnnnnnnnnnnnnnnnnnnnnnnnnnnnnnnnnnnnnnnnnnnnnnnnnnnnnnnnnnnnnnnnnnnnnnnnnnnnnnnnnnnnnnnnnnnnnnnnnnnnnnnnnnnnnnnnnnnnnnnnnnnnnnnnnnnnnnnnnnnnnnnnnnnnnnnnnnnnnnnnnnnnnnnnnnnnnnnnnnnnnnnnnnnnnnnnnnnnnnnnnnnnnnnnnnnnnnnnnnnnnnnnnnnnnnnnnnnnnnnnnnnnnnnnnnnnnnnnnnnnnnnnnnnnnnnnnnnnnnnnnnnnnnnnnnnnnnnnnnnnnnnnnnnnnnnnnnnnnnnnnnnnnnnnnnnnnnnnnnnnnnnnnnnnnnnnnnnnnnnnnnnnnnnnnnnnnnnnnnnnnnnnnnnnnnnnnnnnnnnnnnnnnnnnnnnnnnnnnnnnnnnnnnnnnnnnnnnnnnnnnnnnnnnnnnnnnnnnnnnnnnnnnnnnnnnnnnnnnnnnnnnnnnnnnnnnnnnnnnnnnnnnnnnnnnnnnnnnnnnnnnnnnnnnnnnnnnnnnnnnnnnnnnnnnnnnnnnnnnnnnnnnnnnnnnnnnnnnnnnnnnnnnnnnnnnnnnnnnnnnnnnnnnnnnnnnnnnnnnnnnnnnnnnnnnnnnnnnnnnnnnnnnnnnnnnnnnnnnnnnnnnnnnnnnnnnnnnnnnnnnnnnnnnnnnnnnnnnnnnnnnnnnnnnnnnnnnnnnnnnnnnnnnnnnnnnnnnnnnnnnnnnnnnnnnnnnnnnnnnnnnnnnnnnnnnnnnnnnnnnnnnnnnnnnnnnnnnnnnnnnnnnnnnnnnnnnnnnnnnnnnnnnnnnnnnnnnnnnnnnnnnnnnnnnnnnnnnnnnnnnnnnnnnnnnnnnnnnnnnnnnnnnnnnnnnnnnnnnnnnnnnnnnnnnnnnnnnnnnnnnnnnnnnnnnnnnnnnnnnnnnnnnnnnnnnnnnnnnnnnnnnnnnnnnnnnnnnnnnnnnnnnnnnnnnnnnnnnnnnnnnnnnnnnnnnnnnnnnnnnnnnnnnnnnnnnnnnnnnnnnnnnnnnnnnnnnnnnnnnnnnnnnnnnnnnnnnnnnnnnnnnnnnnnnnnnnnnnnnnnnnnnnnnnnnnnnnnnnnnnnnnnnnnnnnnnnnnnnnnnnnnnnnnnnnnnnnnnnnnnnnnnnnnnnnnnnnnnnnnnnnnnnnnnnnnnnnnnnnnnnnnnnnnnnnnnnnnnnnnnnnnnnnnnnnnnnnnnnnnnnnnnnnnnnnnnnnnnnnnnnnnnnnnnnnnnnnnnnnnnnnnnnnnnnnnnnnnnnnnnnnnnnnnnnnnnnnnnnnnnnnnnnnnnnnnnnnnnnnnnnnnnnnnnnnnnnnnnnnnnnnnnnnnnnnnnnnnnnnnnnnnnnnnnnnnnnnnnnnnnnnnnnnnnnnnnnnnnnnnnnnnnnnnnnnnnnnnnnnnnnnnnnnnnnnnnnnnnnnnnnnnnnnnnnnnnnnnnnnnnnnnnnnnnnnnnnnnnnnnnnnnnnnnnnnnnnnnnnnnnnnnnnnnnnnnnnnnnnnnnnnnnnnnnnnnnnnnnnnnnnnnnnnnnnnnnnnnnnnnnnnnnnnnnnnnnnnnnnnnnnnnnnnnnnnnnnnnnnnnnnnnnnnnnnnnnnnnnnnnnnnnnnnnnnnnnnnnnnnnnnnnnnnnnnnnnnnnnnnnnnnnnnnnnnnnnnnnnnnnnnnnnnnnnnnnnnnnnnnnnnnnnnnnnnnnnnnnnnnnnnnnnnnnnnnnnnnnnnnnnnnnnnnnnnnnnnnnnnnnnnnnnnnnnnnnnnnnnnnnnnnnnnnnnnnnnnnnnnnnnnnnnnnnnnnnnnnnnnnnnnnnnnnnnnnnnnnnnnnnnnnnnnnnnnnnnnnnnnnnnnnnnnnnnnnnnnnnnnnnnnnnnnnnnnnnnnnnnnnnnnnnnnnnnnnnnnnnnnnnnnnnnnnnnnnnnnnnnnnnnnnnnnnnnnnnnnnnnnnnnnnnnnnnnnnnnnnnnnnnnnnnnnnnnnnnnnnnnnnnnnnnnnnnnnnnnnnnnnnnnnnnnnnnnnnnnnnnnnnnnnnnnnnnnnnnnnnnnnnnnnnnnnnnnnnnnnnnnnnnnnnnnnnnnnnnnnnnnnnnnnnnnnnnnnnnnnnnnnnnnnnnnnnnnnnnnnnnnnnnnnnnnnnnnnnnnnnnnnnnnnnnnnnnnnnnnnnnnnnnnnnnnnnnnnnnnnnnnnnnnnnnnnnnnnnnnnnnnnnnnnnnnnnnnnnnnnnnnnnnnnnnnnnnnnnnnnnnnnnnnnnnnnnnnnnnnnnnnnnnnnnnnnnnnnnnnnnnnnnnnnnnnnnnnnnnnnnnnnnnnnnnnnnnnnnnnnnnnnnnnnnnnnnnnnnnnnnnnnnnnnnnnnnnnnnnnnnnnnnnnnnnnnnnnnnnnnnnnnnnnnnnnnnnnnnnnnnnnnnnnnnnnnnnnnnnnnnnnnnnnnnnnnnnnnnnnnnnnnnnnnnnnnnnnnnnnnnnnnnnnnnnnnnnnnnnnnnnnnnnnnnnnnnnnnnnnnnnnnnnnnnnnnnnnnnnnnnnnnnnnnnnnnnnnnnnnnnnnnnnnnnnnnnnnnnnnnnnnnnnnnnnnnnnnnnnnnnnnnnnnnnnnnnnnnnnnnnnnnnnnnnnnnnnnnnnnnnnnnnnnnnnnnnnnnnnnnnnnnnnnnnnnnnnnnnnnnnnnnnnnnnnnnnnnnnnnnnnnnnnnnnnnnnnnnnnnnnnnnnnnnnnnnnnnnnnnnnnnnnnnnnnnnnnnnnnnnnnnnnnnnnnnnnnnnnnnnnnnnnnnnnnnnnnnnnnnnnnnnnnnnnnnnnnnnnnnnnnnnnnnnnnnnnnnnnnnnnnnnnnnnnnnnnnnnnnnnnnnnnnnnnnnnnnnnnnnnnnnnnnnnnnnnnnnnnnnnnnnnnnnnnnnnnnnnnnnnnnnnnnnnnnnnnnnnnnnnnnnnnnnnnnnnnnnnnnnnnnnnnnnnnnnnnnnnnnnnnnnnnnnnnnnnnnnnnnnnnnnnnnnnnnnnnnnnnnnnnnnnnnnnnnnnnnnnnnnnnnnnnnnnnnnnnnnnnnnnnnnnnnnnnnnnnnnnnnnnnnnnnnnnnnnnnnnnnnnnnnnnnnnnnnnnnnnnnnnnnnnnnnnnnnnnnnnnnnnnnnnnnnnnnnnnnnnnnnnnnnnnnnnnnnnnnnnnnnnnnnnnnnnnnnnnnnnnnnnnnnnnnnnnnnnnnnnnnnnnnnnnnnnnnnnnnnnnnnnnnnnnnnnnnnnnnnnnnnnnnnnnnnnnnnnnnnnnnnnnnnnnnnnnnnnnnnnnnnnnnnnnnnnnnnnnnnnnnnnnnnnnnnnnnnnnnnnnnnnnnnnnnnnnnnnnnnnnnnnnnnnnnnnnnnnnnnnnnnnnnnnnnnnnnnnnnnnnnnnnnnnnnnnnnnnnnnnnnnnnnnnnnnnnnnnnnnnnnnnnnnnnnnnnnnnnnnnnnnnnnnnnnnnnnnnnnnnnnnnnnnnnnnnnnnnnnnnnnnnnnnnnnnnnnnnnnnnnnnnnnnnnnnnnnnnnnnnnnnnnnnnnnnnnnnnnnnnnnnnnnnnnnnnnnnnnnnnnnnnnnnnnnnnnnnnnnnnnnnnnnnnnnnnnnnnnnnnnnnnnnnnnnnnnnnnnnnnnnnnnnnnnnnnnnnnnnnnnnnnnnnnnnnnnnnnnnnnnnnnnnnnnnnnnnnnnnnnnnnnnnnnnnnnnnnnnnnnnnnnnnnnnnnnnnnnnnnnnnnnnnnnnnnnnnnnnnnnnnnnnnnnnnnnnnnnnnnnnnnnnnnnnnnnnnnnnnnnnnnnnnnnnnnnnnnnnnnnnnnnnnnnnnnnnnnnnnnnnnnnnnnnnnnnnnnnnnnnnnnnnnnnnnnnnnnnnnnnnnnnnnnnnnnnnnnnnnnnnnnnnnnnnnnnnnnnnnnnnnnnnnnnnnnnnnnnnnnnnnnnnnnnnnnnnnnnnnnnnnnnnnnnnnnnnnnnnnnnnnnnnnnnnnnnnnnnnnnnnnnnnnnnnnnnnnnnnnnnnnnnnnnnnnnnnnnnnnnnnnnnnnnnnnnnnnnnnnnnnnnnnnnnnnnnnnnnnnnnnnnnnnnnnnnnnnnnnnnnnnnnnnnnnnnnnnnnnnnnnnnnnnnnnnnnnnnnnnnnnnnnnnnnnnnnnnnnnnnnnnnnnnnnnnnnnnnnnnnnnnnnnnnnnnnnnnnnnnnnnnnnnnnnnnnnnnnnnnnnnnnnnnnnnnnnnnnnnnnnnnnnnnnnnnnnnnnnnnnnnnnnnnnnnnnnnnnnnnnnnnnnnnnnnnnnnnnnnnnnnnnnnnnnnnnnnnnnnnnnnnnnnnnnnnnnnnnnnnnnnnnnnnnnnnnnnnnnnnnnnnnnnnnnnnnnnnnnnnnnnnnnnnnnnnnnnnnnnnnnnnnnnnnnnnnnnnnnnnnnnnnnnnnnnnnnnnnnnnnnnnnnnnnnnnnnnnnnnnnnnnnnnnnnnnnnnnnnnnnnnnnnnnnnnnnnnnnnnnnnnnnnnnnnnnnnnnnnnnnnnnnnnnnnnnnnnnnnnnnnnnnnnnnnnnnnnnnnnnnnnnnnnnnnnnnnnnnnnnnnnnnnnnnnnnnnnnnnnnnnnnnnnnnnnnnnnnnnnnnnnnnnnnnnnnnnnnnnnnnnnnnnnnnnnnnnnnnnnnnnnnnnnnnnnnnnnnnnnnnnnnnnnnnnnnnnnnnnnnnnnnnnnnnnnnnnnnnnnnnnnnnnnnnnnnnnnnnnnnnnnnnnnnnnnnnnnnnnnnnnnnnnnnnnnnnnnnnnnnnnnnnnnnnnnnnnnnnnnnnnnnnnnnnnnnnnnnnnnnnnnnnnnnnnnnnnnnnnnnnnnnnnnnnnnnnnnnnnnnnnnnnnnnnnnnnnnnnnnnnnnnnnnnnnnnnnnnnnnnnnnnnnnnnnnnnnnnnnnnnnnnnnnnnnnnnnnnnnnnnnnnnnnnnnnnnnnnnnnnnnnnnnnnnnnnnnnnnnnnnnnnnnnnnnnnnnnnnnnnnnnnnnnnnnnnnnnnnnnnnnnnnnnnnnnnnnnnnnnnnnnnnnnnnnnnnnnnnnnnnnnnnnnnnnnnnnnnnnnnnnnnnnnnnnnnnnnnnnnnnnnnnnnnnnnnnnnnnnnnnnnnnnnnnnnnnnnnnnnnnnnnnnnnnnnnnnnnnnnnnnnnnnnnnnnnnnnnnnnnnnnnnnnnnnnnnnnnnnnnnnnnnnnnnnnnnnnnnnnnnnnnnnnnnnnnnnnnnnnnnnnnnnnnnnnnnnnnnnnnnnnnnnnnnnnnnnnnnnnnnnnnnnnnnnnnnnnnnnnnnnnnnnnnnnnnnnnnnnnnnnnnnnnnnnnnnnnnnnnnnnnnnnnnnnnnnnnnnnnnnnnnnnnnnnnnnnnnnnnnnnnnnnnnnnnnnnnnnnnnnnnnnnnnnnnnnnnnnnnnnnnnnnnnnnnnnnnnnnnnnnnnnnnnnnnnnnnnnnnnnnnnnnnnnnnnnnnnnnnnnnnnnnnnnnnnnnnnnnnnnnnnnnnnnnnnnnnnnnnnnnnnnnnnnnnnnnnnnnnnnnnnnnnnnnnnnnnnnnnnnnnnnnnnnnnnnnnnnnnnnnnnnnnnnnnnnnnnnnnnnnnnnnnnnnnnnnnnnnnnnnnnnnnnnnnnnnnnnnnnnnnnnnnnnnnnnnnnnnnnnnnnnnnnnnnnnnnnnnnnnnnnnnnnnnnnnnnnnnnnnnnnnnnnnnnnnnnnnnnnnnnnnnnnnnnnnnnnnnnnnnnnnnnnnnnnnnnnnnnnnnnnnnnnnnnnnnnnnnnnnnnnnnnnnnnnnnnnnnnnnnnnnnnnnnnnnnnnnnnnnnnnnnnnnnnnnnnnnnnnnnnnnnnnnnnnnnnnnnnnnnnnnnnnnnnnnnnnnnnnnnnnnnnnnnnnnnnnnnnnnnnnnnnnnnnnnnnnnnnnnnnnnnnnnnnnnnnnnnnnnnnnnnnnnnnnnnnnnnnnnnnnnnnnnnnnnnnnnnnnnnnnnnnnnnnnnnnnnnnnnnnnnnnnnnnnnnnnnnnnnnnnnnnnnnnnnnnnnnnnnnnnnnnnnnnnnnnnnnnnnnnnnnnnnnnnnnnnnnnnnnnnnnnnnnnnnnnnnnnnnnnnnnnnnnnnnnnnnnnnnnnnnnnnnnnnnnnnnnnnnnnnnnnnnnnnnnnnnnnnnnnnnnnnnnnnnnnnnnnnnnnnnnnnnnnnnnnnnnnnnnnnnnnnnnnnnnnnnnnnnnnnnnnnnnnnnnnnnnnnnnnnnnnnnnnnnnnnnnnnnnnnnnnnnnnnnnnnnnnnnnnnnnnnnnnnnnnnnnnnnnnnnnnnnnnnnnnnnnnnnnnnnnnnnnnnnnnnnnnnnnnnnnnnnnnnnnnnnnnnnnnnnnnnnnnnnnnnnnnnnnnnnnnnnnnnnnnnnnnnnnnnnnnnnnnnnnnnnnnnnnnnnnnnnnnnnnnnnnnnnnnnnnnnnnnnnnnnnnnnnnnnnnnnnnnnnnnnnnnnnnnnnnnnnnnnnnnnnnnnnnnnnnnnnnnnnnnnnnnnnnnnnnnnnnnnnnnnnnnnnnnnnnnnnnnnnnnnnnnnnnnnnnnnnnnnnnnnnnnnnnnnnnnnnnnnnnnnnnnnnnnnnnnnnnnnnnnnnnnnnnnnnnnnnnnnnnnnnnnnnnnnnnnnnnnnnnnnnnnnnnnnnnnnnnnnnnnnnnnnnnnnnnnnnnnnnnnnnnnnnnnnnnnnnnnnnnnnnnnnnnnnnnnnnnnnnnnnnnnnnnnnnnnnnnnnnnnnnnnnnnnnnnnnnnnnnnnnnnnnnnnnnnnnnnnnnnnnnnnnnnnnnnnnnnnnnnnnnnnnnnnnnnnnnnnnnnnnnnnnnnnnnnnnnnnnnnnnnnnnnnnnnnnnnnnnnnnnnnnnnnnnnnnnnnnnnnnnnnnnnnnnnnnnnnnnnnnnnnnnnnnnnnnnnnnnnnnnnnnnnnnnnnnnnnnnnnnnnnnnnnnnnnnnnnnnnnnnnnnnnnnnnnnnnnnnnnnnnnnnnnnnnnnnnnnnnnnnnnnnnnnnnnnnnnnnnnnnnnnnnnnnnnnnnnnnnnnnnnnnnnnnnnnnnnnnnnnnnnnnnnnnnnnnnnnnnnnnnnnnnnnnnnnnnnnnnnnnnnnnnnnnnnnnnnnnnnnnnnnnnnnnnnnnnnnnnnnnnnnnnnnnnnnnnnnnnnnnnnnnnnnnnnnnnnnnnnnnnnnnnnnnnnnnnnnnnnnnnnnnnnnnnnnnnnnnnnnnnnnnnnnnnnnnnnnnnnnnnnnnnnnnnnnnnnnnnnnnnnnnnnnnnnnnnnnnnnnnnnnnnnnnnnnnnnnnnnnnnnnnnnnnnnnnnnnnnnnnnnnnnnnnnnnnnnnnnnnnnnnnnnnnnnnnnnnnnnnnnnnnnnnnnnnnnnnnnnnnnnnnnnnnnnnnnnnnnnnnnnnnnnnnnnnnnnnnnnnnnnnnnnnnnnnnnnnnnnnnnnnnnnnnnnnnnnnnnnnnnnnnnnnnnnnnnnnnnnnnnnnnnnnnnnnnnnnnnnnnnnnnnnnnnnnnnnnnnnnnnnnnnnnnnnnnnnnnnnnnnnnnnnnnnnnnnnnnnnnnnnnnnnnnnnnnnnnnnnnnnnnnnnnnnnnnnnnnnnnnnnnnnnnnnnnnnnnnnnnnnnnnnnnnnnnnnnnnnnnnnnnnnnnnnnnnnnnnnnnnnnnnnnnnnnnnnnnnnnnnnnnnnnnnnnnnnnnnnnnnnnnnnnnnnnnnnnnnnnnnnnnnnnnnnnnnnnnnnnnnnnnnnnnnnnnnnnnnnnnnnnnnnnnnnnnnnnnnnnnnnnnnnnnnnnnnnnnnnnnnnnnnnnnnnnnnnnnnnnnnnnnnnnnnnnnnnnnnnnnnnnnnnnnnnnnnnnnnnnnnnnnnnnnnnnnnnnnnnnnnnnnnnnnnnnnnnnnnnnnnnnnnnnnnnnnnnnnnnnnnnnnnnnnnnnnnnnnnnnnnnnnnnnnnnnnnnnnnnnnnnnnnnnnnnnnnnnnnnnnnnnnnnnnnnnnnnnnnnnnnnnnnnnnnnnnnnnnnnnnnnnnnnnnnnnnnnnnnnnnnnnnnnnnnnnnnnnnnnnnnnnnnnnnnnnnnnnnnnnnnnnnnnnnnnnnnnnnnnnnnnnnnnnnnnnnnnnnnnnnnnnnnnnnnnnnnnnnnnnnnnnnnnnnnnnnnnnnnnnnnnnnnnnnnnnnnnnnnnnnnnnnnnnnnnnnnnnnnnnnnnnnnnnnnnnnnnnnnnnnnnnnnnnnnnnnnnnnnnnnnnnnnnnnnnnnnnnnnnnnnnnnnnnnnnnnnnnnnnnnnnnnnnnnnnnnnnnnnnnnnnnnnnnnnnnnnnnnnnnnnnnnnnnnnnnnnnnnnnnnnnnnnnnnnnnnnnnnnnnnnnnnnnnnnnnnnnnnnnnnnnnnnnnnnnnnnnnnnnnnnnnnnnnnnnnnnnnnnnnnnnnnnnnnnnnnnnnnnnnnnnnnnnnnnnnnnnnnnnnnnnnnnnnnnnnnnnnnnnnnnnnnnnnnnnnnnnnnnnnnnnnnnnnnnnnnnnnnnnnnnnnnnnnnnnnnnnnnnnnnnnnnnnnnnnnnnnnnnnnnnnnnnnnnnnnnnnnnnnnnnnnnnnnnnnnnnnnnnnnnnnnnnnnnnnnnnnnnnnnnnnnnnnnnnnnnnnnnnnnnnnnnnnnnnnnnnnnnnnnnnnnnnnnnnnnnnnnnnnnnnnnnnnnnnnnnnnnnnnnnnnnnnnnnnnnnnnnnnnnnnnnnnnnnnnnnnnnnnnnnnnnnnnnnnnnnnnnnnnnnnnnnnnnnnnnnnnnnnnnnnnnnnnnnnnnnnnnnnnnnnnnnnnnnnnnnnnnnnnnnnnnnnnnnnnnnnnnnnnnnnnnnnnnnnnnnnnnnnnnnnnnnnnnnnnnnnnnnnnnnnnnnnnnnnnnnnnnnnnnnnnnnnnnnnnnnnnnnnnnnnnnnnnnnnnnnnnnnnnnnnnnnnnnnnnnnnnnnnnnnnnnnnnnnnnnnnnnnnnnnnnnnnnnnnnnnnnnnnnnnnnnnnnnnnnnnnnnnnnnnnnnnnnnnnnnnnnnnnnnnnnnnnnnnnnnnnnnnnnnnnnnnnnnnnnnnnnnnnnnnnnnnnnnnnnnnnnnnnnnnnnnnnnnnnnnnnnnnnnnnnnnnnnnnnnnnnnnnnnnnnnnnnnnnnnnnnnnnnnnnnnnnnnnnnnnnnnnnnnnnnnnnnnnnnnnnnnnnnnnnnnnnnnnnnnnnnnnnnnnnnnnnnnnnnnnnnnnnnnnnnnnnnnnnnnnnnnnnnnnnnnnnnnnnnnnnnnnnnnnnnnnnnnnnnnnnnnnnnnnnnnnnnnnnnnnnnnnnnnnnnnnnnnnnnnnnnnnnnnnnnnnnnnnnnnnnnnnnnnnnnnnnnnnnnnnnnnnnnnnnnnnnnnnnnnnnnnnnnnnnnnnnnnnnnnnnnnnnnnnnnnnnnnnnnnnnnnnnnnnnnnnnnnnnnnnnnnnnnnnnnnnnnnnnnnnnnnnnnnnnnnnnnnnnnnnnnnnnnnnnnnnnnnnnnnnnnnnnnnnnnnnnnnnnnnnnnnnnnnnnnnnnnnnnnnnnnnnnnnnnnnnnnnnnnnnnnnnnnnnnnnnnnnnnnnnnnnnnnnnnnnnnnnnnnnnnnnnnnnnnnnnnnnnnnnnnnnnnnnnnnnnnnnnnnnnnnnnnnnnnnnnnnnnnnnnnnnnnnnnnnnnnnnnnnnnnnnnnnnnnnnnnnnnnnnnnnnnnnnnnnnnnnnnnnnnnnnnnnnnnnnnnnnnnnnnnnnnnnnnnnnnnnnnnnnnnnnnnnnnnnnnnnnnnnnnnnnnnnnnnnnnnnnnnnnnnnnnnnnnnnnnnnnnnnnnnnnnnnnnnnnnnnnnnnnnnnnnnnnnnnnnnnnnnnnnnnnnnnnnnnnnnnnnnnnnnnnnnnnnnnnnnnnnnnnnnnnnnnnnnnnnnnnnnnnnnnnnnnnnnnnnnnnnnnnnnnnnnnnnnnnnnnnnnnnnnnnnnnnnnnnnnnnnnnnnnnnnnnnnnnnnnnnnnnnnnnnnnnnnnnnnnnnnnnnnnnnnnnnnnnnnnnnnnnnnnnnnnnnnnnnnnnnnnnnnnnnnnnnnnnnnnnnnnnnnnnnnnnnnnnnnnnnnnnnnnnnnnnnnnnnnnnnnnnnnnnnnnnnnnnnnnnnnnnnnnnnnnnnnnnnnnnnnnnnnnnnnnnnnnnnnnnnnnnnnnnnnnnnnnnnnnnnnnnnnnnnnnnnnnnnnnnnnnnnnnnnnnnnnnnnnnnnnnnnnnnnnnnnnnnnnnnnnnnnnnnnnnnnnnnnnnnnnnnnnnnnnnnnnnnnnnnnnnnnnnnnnnnnnnnnnnnnnnnnnnnnnnnnnnnnnnnnnnnnnnnnnnnnnnnnnnnnnnnnnnnnnnnnnnnnnnnnnnnnnnnnnnnnnnnnnnnnnnnnnnnnnnnnnnnnnnnnnnnnnnnnnnnnnnnnnnnnnnnnnnnnnnnnnnnnnnnnnnnnnnnnnnnnnnnnnnnnnnnnnnnnnnnnnnnnnnnnnnnnnnnnnnnnnnnnnnnnnnnnnnnnnnnnnnnnnnnnnnnnnnnnnnnnnnnnnnnnnnnnnnnnnnnnnnnnnnnnnnnnnnnnnnnnnnnnnnnnnnnnnnnnnnnnnnnnnnnnnnnnnnnnnnnnnnnnnnnnnnnnnnnnnnnnnnnnnnnnnnnnnnnnnnnnnnnnnnnnnnnnnnnnnnnnnnnnnnnnnnnnnnnnnnnnnnnnnnnnnnnnnnnnnnnnnnnnnnnnnnnnnnnnnnnnnnnnnnnnnnnnnnnnnnnnnnnnnnnnnnnnnnnnnnnnnnnnnnnnnnnnnnnnnnnnnnnnnnnnnnnnnnnnnnnnnnnnnnnnnnnnnnnnnnnnnnnnnnnnnnnnnnnnnnnnnnnnnnnnnnnnnnnnnnnnnnnnnnnnnnnnnnnnnnnnnnnnnnnnnnnnnnnnnnnnnnnnnnnnnnnnnnnnnnnnnnnnnnnnnnnnnnnnnnnnnnnnnnnnnnnnnnnnnnnnnnnnnnnnnnnnnnnnnnnnnnnnnnnnnnnnnnnnnnnnnnnnnnnnnnnnnnnnnnnnnnnnnnnnnnnnnnnnnnnnnnnnnnnnnnnnnnnnnnnnnnnnnnnnnnnnnnnnnnnnnnnnnnnnnnnnnnnnnnnnnnnnnnnnnnnnnnnnnnnnnnnnnnnnnnnnnnnnnnnnnnnnnnnnnnnnnnnnnnnnnnnnnnnnnnnnnnnnnnnnnnnnnnnnnnnnnnnnnnnnnnnnnnnnnnnnnnnnnnnnnnnnnnnnnnnnnnnnnnnnnnnnnnnnnnnnnnnnnnnnnnnnnnnnnnnnnnnnnnnnnnnnnnnnnnnnnnnnnnnnnnnnnnnnnnnnnnnnnnnnnnnnnnnnnnnnnnnnnnnnnnnnnnnnnnnnnnnnnnnnnnnnnnnnnnnnnnnnnnnnnnnnnnnnnnnnnnnnnnnnnnnnnnnnnnnnnnnnnnnnnnnnnnnnnnnnnnnnnnnnnnnnnnnnnnnnnnnnnnnnnnnnnnnnnnnnnnnnnnnnnnnnnnnnnnnnnnnnnnnnnnnnnnnnnnnnnnnnnnnnnnnnnnnnnnnnnnnnnnnnnnnnnnnnnnnnnnnnnnnnnnnnnnnnnnnnnnnnnnnnnnnnnnnnnnnnnnnnnnnnnnnnnnnnnnnnnnnnnnnnnnnnnnnnnnnnnnnnnnnnnnnnnnnnnnnnnnnnnnnnnnnnnnnnnnnnnnnnnnnnnnnnnnnnnnnnnnnnnnnnnnnnnnnnnnnnnnnnnnnnnnnnnnnnnnnnnnnnnnnnnnnnnnnnnnnnnnnnnnnnnnnnnnnnnnnnnnnnnnnnnnnnnnnnnnnnnnnnnnnnnnnnnnnnnnnnnnnnnnnnnnnnnnnnnnnnnnnnnnnnnnnnnnnnnnnnnnnnnnnnnnnnnnnnnnnnnnnnnnnnnnnnnnnnnnnnnnnnnnnnnnnnnnnnnnnnnnnnnnnnnnnnnnnnnnnnnnnnnnnnnnnnnnnnnnnnnnnnnnnnnnnnnnnnnnnnnnnnnnnnnnnnnnnnnnnnnnnnnnnnnnnnnnnnnnnnnnnnnnnnnnnnnnnnnnnnnnnnnnnnnnnnnnnnnnnnnnnnnnnnnnnnnnnnnnnnnnnnnnnnnnnnnnnnnnnnnnnnnnnnnnnnnnnnnnnnnnnnnnnnnnnnnnnnnnnnnnnnnnnnnnnnnnnnnnnnnnnnnnnnnnnnnnnnnnnnnnnnnnnnnnnnnnnnnnnnnnnnnnnnnnnnnnnnnnnnnnnnnnnnnnnnnnnnnnnnnnnnnnnnnnnnnnnnnnnnnnnnnnnnnnnnnnnnnnnnnnnnnnnnnnnnnnnnnnnnnnnnnnnnnnnnnnnnnnnnnnnnnnnnnnnnnnnnnnnnnnnnnnnnnnnnnnnnnnnnnnnnnnnnnnnnnnnnnnnnnnnnnnnnnnnnnnnnnnnnnnnnnnnnnnnnnnnnnnnnnnnnnnnnnnnnnnnnnnnnnnnnnnnnnnnnnnnnnnnnnnnnnnnnnnnnnnnnnnnnnnnnnnnnnnnnnnnnnnnnnnnnnnnnnnnnnnnnnnnnnnnnnnnnnnnnnnnnnnnnnnnnnnnnnnnnnnnnnnnnnnnnnnnnnnnnnnnnnnnnnnnnnnnnnnnnnnnnnnnnnnnnnnnnnnnnnnnnnnnnnnnnnnnnnnnnnnnnnnnnnnnnnnnnnnnnnnnnnnnnnnnnnnnnnnnnnnnnnnnnnnnnnnnnnnnnnnnnnnnnnnnnnnnnnnnnnnnnnnnnnnnnnnnnnnnnnnnnnnnnnnnnnnnnnnnnnnnnnnnnnnnnnnnnnnnnnnnnnnnnnnnnnnnnnnnnnnnnnnnnnnnnnnnnnnnnnnnnnnnnnnnnnnnnnnnnnnnnnnnnnnnnnnnnnnnnnnnnnnnnnnnnnnnnnnnnnnnnnnnnnnnnnnnnnnnnnnnnnnnnnnnnnnnnnnnnnnnnnnnnnnnnnnnnnnnnnnnnnnnnnnnnnnnnnnnnnnnnnnnnnnnnnnnnnnnnnnnnnnnnnnnnnnnnnnnnnnnnnnnnnnnnnnnnnnnnnnnnnnnnnnnnnnnnnnnnnnnnnnnnnnnnnnnnnnnnnnnnnnnnnnnnnnnnnnnnnnnnnnnnnnnnnnnnnnnnnnnnnnnnnnnnnnnnnnnnnnnnnnnnnnnnnnnnnnnnnnnnnnnnnnnnnnnnnnnnnnnnnnnnnnnnnnnnnnnnnnnnnnnnnnnnnnnnnnnnnnnnnnnnnnnnnnnnnnnnnnnnnnnnnnnnnnnnnnnnnnnnnnnnnnnnnnnnnnnnnnnnnnnnnnnnnnnnnnnnnnnnnnnnnnnnnnnnnnnnnnnnnnnnnnnnnnnnnnnnnnnnnnnnnnnnnnnnnnnnnnnnnnnnnnnnnnnnnnnnnnnnnnnnnnnnnnnnnnnnnnnnnnnnnnnnnnnnnnnnnnnnnnnnnnnnnnnnnnnnnnnnnnnnnnnnnnnnnnnnnnnnnnnnnnnnnnnnnnnnnnnnnnnnnnnnnnnnnnnnnnnnnnnnnnnnnnnnnnnnnnnnnnnnnnnnnnnnnnnnnnnnnnnnnnnnnnnnnnnnnnnnnnnnnnnnnnnnnnnnnnnnnnnnnnnnnnnnnnnnnnnnnnnnnnnnnnnnnnnnnnnnnnnnnnnnnnnnnnnnnnnnnnnnnnnnnnnnnnnnnnnnnnnnnnnnnnnnnnnnnnnnnnnnnnnnnnnnnnnnnnnnnnnnnnnnnnnnnnnnnnnnnnnnnnnnnnnnnnnnnnnnnnnnnnnnnnnnnnnnnnnnnnnnnnnnnnnnnnnnnnnnnnnnnnnnnnnnnnnnnnnnnnnnnnnnnnnnnnnnnnnnnnnnnnnnnnnnnnnnnnnnnnnnnnnnnnnnnnnnnnnnnnnnnnnnnnnnnnnnnnnnnnnnnnnnnnnnnnnnnnnnnnnnnnnnnnnnnnnnnnnnnnnnnnnnnnnnnnnnnnnnnnnnnnnnnnnnnnnnnnnnnnnnnnnnnnnnnnnnnnnnnnnnnnnnnnnnnnnnnnnnnnnnnnnnnnnnnnnnnnnnnnnnnnnnnnnnnnnnnnnnnnnnnnnnnnnnnnnnnnnnnnnnnnnnnnnnnnnnnnnnnnnnnnnnnnnnnnnnnnnnnnnnnnnnnnnnnnnnnnnnnnnnnnnnnnnnnnnnnnnnnnnnnnnnnnnnnnnnnnnnnnnnnnnnnnnnnnnnnnnnnnnnnnnnnnnnnnnnnnnnnnnnnnnnnnnnnnnnnnnnnnnnnnnnnnnnnnnnnnnnnnnnnnnnnnnnnnnnnnnnnnnnnnnnnnnnnnnnnnnnnnnnnnnnnnnnnnnnnnnnnnnnnnnnnnnnnnnnnnnnnnnnnnnnnnnnnnnnnnnnnnnnnnnnnnnnnnnnnnnnnnnnnnnnnnnnnnnnnnnnnnnnnnnnnnnnnnnnnnnnnnnnnnnnnnnnnnnnnnnnnnnnnnnnnnnnnnnnnnnnnnnnnnnnnnnnnnnnnnnnnnnnnnnnnnnnnnnnnnnnnnnnnnnnnnnnnnnnnnnnnnnnnnnnnnnnnnnnnnnnnnnnnnnnnnnnnnnnnnnnnnnnnnnnnnnnnnnnnnnnnnnnnnnnnnnnnnnnnnnnnnnnnnnnnnnnnnnnnnnnnnnnnnnnnnnnnnnnnnnnnnnnnnnnnnnnnnnnnnnnnnnnnnnnnnnnnnnnnnnnnnnnnnnnnnnnnnnnnnnnnnnnnnnnnnnnnnnnnnnnnnnnnnnnnnnnnnnnnnnnnnnnnnnnnnnnnnnnnnnnnnnnnnnnnnnnnnnnnnnnnnnnnnnnnnnnnnnnnnnnnnnnnnnnnnnnnnnnnnnnnnnnnnnnnnnnnnnnnnnnnnnnnnnnnnnnnnnnnnnnnnnnnnnnnnnnnnnnnnnnnnnnnnnnnnnnnnnnnnnnnnnnnnnnnnnnnnnnnnnnnnnnnnnnnnnnnnnnnnnnnnnnnnnnnnnnnnnnnnnnnnnnnnnnnnnnnnnnnnnnnnnnnnnnnnnnnnnnnnnnnnnnnnnnnnnnnnnnnnnnnnnnnnnnnnnnnnnnnnnnnnnnnnnnnnnnnnnnnnnnnnnnnnnnnnnnnnnnnnnnnnnnnnnnnnnnnnnnnnnnnnnnnnnnnnnnnnnnnnnnnnnnnnnnnnnnnnnnnnnnnnnnnnnnnnnnnnnnnnnnnnnnnnnnnnnnnnnnnnnnnnnnnnnnnnnnnnnnnnnnnnnnnnnnnnnnnnnnnnnnnnnnnnnnnnnnnnnnnnnnnnnnnnnnnnnnnnnnnnnnnnnnnnnnnnnnnnnnnnnnnnnnnnnnnnnnnnnnnnnnnnnnnnnnnnnnnnnnnnnnnnnnnnnnnnnnnnnnnnnnnnnnnnnnnnnnnnnnnnnnnnnnnnnnnnnnnnnnnnnnnnnnnnnnnnnnnnnnnnnnnnnnnnnnnnnnnnnnnnnnnnnnnnnnnnnnnnnnnnnnnnnnnnnnnnnnnnnnnnnnnnnnnnnnnnnnnnnnnnnnnnnnnnnnnnnnnnnnnnnnnnnnnnnnnnnnnnnnnnnnnnnnnnnnnnnnnnnnnnnnnnnnnnnnnnnnnnnnnnnnnnnnnnnnnnnnnnnnnnnnnnnnnnnnnnnnnnnnnnnnnnnnnnnnnnnnnnnnnnnnnnnnnnnnnnnnnnnnnnnnnnnnnnnnnnnnnnnnnnnnnnnnnnnnnnnnnnnnnnnnnnnnnnnnnnnnnnnnnnnnnnnnnnnnnnnnnnnnnnnnnnnnnnnnnnnnnnnnnnnnnnnnnnnnnnnnnnnnnnnnnnnnnnnnnnnnnnnnnnnnnnnnnnnnnnnnnnnnnnnnnnnnnnnnnnnnnnnnnnnnnnnnnnnnnnnnnnnnnnnnnnnnnnnnnnnnnnnnnnnnnnnnnnnnnnnnnnnnnnnnnnnnnnnnnnnnnnnnnnnnnnnnnnnnnnnnnnnnnnnnnnnnnnnnnnnnnnnnnnnnnnnnnnnnnnnnnnnnnnnnnnnnnnnnnnnnnnnnnnnnnnnnnnnnnnnnnnnnnnnnnnnnnnnnnnnnnnnnnnnnnnnnnnnnnnnnnnnnnnnnnnnnnnnnnnnnnnnnnnnnnnnnnnnnnnnnnnnnnnnnnnnnnnnnnnnnnnnnnnnnnnnnnnnnnnnnnnnnnnnnnnnnnnnnnnnnnnnnnnnnnnnnnnnnnnnnnnnnnnnnnnnnnnnnnnnnnnnnnnnnnnnnnnnnnnnnnnnnnnnnnnnnnnnnnnnnnnnnnnnnnnnnnnnnnnnnnnnnnnnnnnnnnnnnnnnnnnnnnnnnnnnnnnnnnnnnnnnnnnnnnnnnnnnnnnnnnnnnnnnnnnnnnnnnnnnnnnnnnnnnnnnnnnnnnnnnnnnnnnnnnnnnnnnnnnnnnnnnnnnnnnnnnnnnnnnnnnnnnnnnnnnnnnnnnnnnnnnnnnnnnnnnnnnnnnnnnnnnnnnnnnnnnnnnnnnnnnnnnnnnnnnnnnnnnnnnnnnnnnnnnnnnnnnnnnnnnnnnnnnnnnnnnnnnnnnnnnnnnnnnnnnnnnnnnnnnnnnnnnnnnnnnnnnnnnnnnnnnnnnnnnnnnnnnnnnnnnnnnnnnnnnnnnnnnnnnnnnnnnnnnnnnnnnnnnnnnnnnnnnnnnnnnnnnnnnnnnnnnnnnnnnnnnnnnnnnnnnnnnnnnnnnnnnnnnnnnnnnnnnnnnnnnnnnnnnnnnnnnnnnnnnnnnnnnnnnnnnnnnnnnnnnnnnnnnnnnnnnnnnnnnnnnnnnnnnnnnnnnnnnnnnnnnnnnnnnnnnnnnnnnnnnnnnnnnnnnnnnnnnnnnnnnnnnnnnnnnnnnnnnnnnnnnnnnnnnnnnnnnnnnnnnnnnnnnnnnnnnnnnnnnnnnnnnnnnnnnnnnnnnnnnnnnnnnnnnnnnnnnnnnnnnnnnnnnnnnnnnnnnnnnnnnnnnnnnnnnnnnnnnnnnnnnnnnnnnnnnnnnnnnnnnnnnnnnnnnnnnnnnnnnnnnnnnnnnnnnnnnnnnnnnnnnnnnnnnnnnnnnnnnnnnnnnnnnnnnnnnnnnnnnnnnnnnnnnnnnnnnnnnnnnnnnnnnnnnnnnnnnnnnnnnnnnnnnnnnnnnnnnnnnnnnnnnnnnnnnnnnnnnnnnnnnnnnnnnnnnnnnnnnnnnnnnnnnnnnnnnnnnnnnnnnnnnnnnnnnnnnnnnnnnnnnnnnnnnnnnnnnnnnnnnnnnnnnnnnnnnnnnnnnnnnnnnnnnnnnnnnnnnnnnnnnnnnnnnnnnnnnnnnnnnnnnnnnnnnnnnnnnnnnnnnnnnnnnnnnnnnnnnnnnnnnnnnnnnnnnnnnnnnnnnnnnnnnnnnnnnnnnnnnnnnnnnnnnnnnnnnnnnnnnnnnnnnnnnnnnnnnnnnnnnnnnnnnnnnnnnnnnnnnnnnnnnnnnnnnnnnnnnnnnnnnnnnnnnnnnnnnnnnnnnnnnnnnnnnnnnnnnnnnnnnnnnnnnnnnnnnnnnnnnnnnnnnnnnnnnnnnnnnnnnnnnnnnnnnnnnnnnnnnnnnnnnnnnnnnnnnnnnnnnnnnnnnnnnnnnnnnnnnnnnnnnnnnnnnnnnnnnnnnnnnnnnnnnnnnnnnnnnnnnnnnnnnnnnnnnnnnnnnnnnnnnnnnnnnnnnnnnnnnnnnnnnnnnnnnnnnnnnnnnnnnnnnnnnnnnnnnnnnnnnnnnnnnnnnnnnnnnnnnnnnnnnnnnnnnnnnnnnnnnnnnnnnnnnnnnnnnnnnnnnnnnnnnnnnnnnnnnnnnnnnnnnnnnnnnnnnnnnnnnnnnnnnnnnnnnnnnnnnnnnnnnnnnnnnnnnnnnnnnnnnnnnnnnnnnnnnnnnnnnnnnnnnnnnnnnnnnnnnnnnnnnnnnnnnnnnnnnnnnnnnnnnnnnnnnnnnnnnnnnnnnnnnnnnnnnnnnnnnnnnnnnnnnnnnnnnnnnnnnnnnnnnnnnnnnnnnnnnnnnnnnnnnnnnnnnnnnnnnnnnnnnnnnnnnnnnnnnnnnnnnnnnnnnnnnnnnnnnnnnnnnnnnnnnnnnnnnnnnnnnnnnnnnnnnnnnnnnnnnnnnnnnnnnnnnnnnnnnnnnnnnnnnnnnnnnnnnnnnnnnnnnnnnnnnnnnnnnnnnnnnnnnnnnnnnnnnnnnnnnnnnnnnnnnnnnnnnnnnnnnnnnnnnnnnnnnnnnnnnnnnnnnnnnnnnnnnnnnnnnnnnnnnnnnnnnnnnnnnnnnnnnnnnnnnnnnnnnnnnnnnnnnnnnnnnnnnnnnnnnnnnnnnnnnnnnnnnnnnnnnnnnnnnnnnnnnnnnnnnnnnnnnnnnnnnnnnnnnnnnnnnnnnnnnnnnnnnnnnnnnnnnnnnnnnnnnnnnnnnnnnnnnnnnnnnnnnnnnnnnnnnnnnnnnnnnnnnnnnnnnnnnnnnnnnnnnnnnnnnnnnnnnnnnnnnnnnnnnnnnnnnnnnnnnnnnnnnnnnnnnnnnnnnnnnnnnnnnnnnnnnnnnnnnnnnnnnnnnnnnnnnnnnnnnnnnnnnnnnnnnnnnnnnnnnnnnnnnnnnnnnnnnnnnnnnnnnnnnnnnnnnnnnnnnnnnnnnnnnnnnnnnnnnnnnnnnnnnnnnnnnnnnnnnnnnnnnnnnnnnnnnnnnnnnnnnnnnnnnnnnnnnnnnnnnnnnnnnnnnnnnnnnnnnnnnnnnnnnnnnnnnnnnnnnnnnnnnnnnnnnnnnnnnnnnnnnnnnnnnnnnnnnnnnnnnnnnnnnnnnnnnnnnnnnnnnnnnnnnnnnnnnnnnnnnnnnnnnnnnnnnnnnnnnnnnnnnnnnnnnnnnnnnnnnnnnnnnnnnnnnnnnnnnnnnnnnnnnnnnnnnnnnnnnnnnnnnnnnnnnnnnnnnnnnnnnnnnnnnnnnnnnnnnnnnnnnnnnnnnnnnnnnnnnnnnnnnnnnnnnnnnnnnnnnnnnnnnnnnnnnnnnnnnnnnnnnnnnnnnnnnnnnnnnnnnnnnnnnnnnnnnnnnnnnnnnnnnnnnnnnnnnnnnnnnnnnnnnnnnnnnnnnnnnnnnnnnnnnnnnnnnnnnnnnnnnnnnnnnnnnnnnnnnnnnnnnnnnnnnnnnnnnnnnnnnnnnnnnnnnnnnnnnnnnnnnnnnnnnnnnnnnnnnnnnnnnnnnnnnnnnnnnnnnnnnnnnnnnnnnnnnnnnnnnnnnnnnnnnnnnnnnnnnnnnnnnnnnnnnnnnnnnnnnnnnnnnnnnnnnnnnnnnnnnnnnnnnnnnnnnnnnnnnnnnnnnnnnnnnnnnnnnnnnnnnnnnnnnnnnnnnnnnnnnnnnnnnnnnnnnnnnnnnnnnnnnnnnnnnnnnnnnnnnnnnnnnnnnnnnnnnnnnnnnnnnnnnnnnnnnnnnnnnnnnnnnnnnnnnnnnnnnnnnnnnnnnnnnnnnnnnnnnnnnnnnnnnnnnnnnnnnnnnnnnnnnnnnnnnnnnnnnnnnnnnnnnnnnnnnnnnnnnnnnnnnnnnnnnnnnnnnnnnnnnnnnnnnnnnnnnnnnnnnnnnnnnnnnnnnnnnnnnnnnnnnnnnnnnnnnnnnnnnnnnnnnnnnnnnnnnnnnnnnnnnnnnnnnnnnnnnnnnnnnnnnnnnnnnnnnnnnnnnnnnnnnnnnnnnnnnnnnnnnnnnnnnnnnnnnnnnnnnnnnnnnnnnnnnnnnnnnnnnnnnnnnnnnnnnnnnnnnnnnnnnnnnnnnnnnnnnnnnnnnnnnnnnnnnnnnnnnnnnnnnnnnnnnnnnnnnnnnnnnnnnnnnnnnnnnnnnnnnnnnnnnnnnnnnnnnnnnnnnnnnnnnnnnnnnnnnnnnnnnnnnnnnnnnnnnnnnnnnnnnnnnnnnnnnnnnnnnnnnnnnnnnnnnnnnnnnnnnnnnnnnnnnnnnnnnnnnnnnnnnnnnnnnnnnnnnnnnnnnnnnnnnnnnnnnnnnnnnnnnnnnnnnnnnnnnnnnnnnnnnnnnnnnnnnnnnnnnnnnnnnnnnnnnnnnnnnnnnnnnnnnnnnnnnnnnnnnnnnnnnnnnnnnnnnnnnnnnnnnnnnnnnnnnnnnnnnnnnnnnnnnnnnnnnnnnnnnnnnnnnnnnnnnnnnnnnnnnnnnnnnnnnnnnnnnnnnnnnnnnnnnnnnnnnnnnnnnnnnnnnnnnnnnnnnnnnnnnnnnnnnnnnnnnnnnnnnnnnnnnnnnnnnnnnnnnnnnnnnnnnnnnnnnnnnnnnnnnnnnnnnnnnnnnnnnnnnnnnnnnnnnnnnnnnnnnnnnnnnnnnnnnnnnnnnnnnnnnnnnnnnnnnnnnnnnnnnnnnnnnnnnnnnnnnnnnnnnnnnnnnnnnnnnnnnnnnnnnnnnnnnnnnnnnnnnnnnnnnnnnnnnnnnnnnnnnnnnnnnnnnnnnnnnnnnnnnnnnnnnnnnnnnnnnnnnnnnnnnnnnnnnnnnnnnnnnnnnnnnnnnnnnnnnnnnnnnnnnnnnnnnnnnnnnnnnnnnnnnnnnnnnnnnnnnnnnnnnnnnnnnnnnnnnnnnnnnnnnnnnnnnnnnnnnnnnnnnnnnnnnnnnnnnnnnnnnnnnnnnnnnnnnnnnnnnnnnnnnnnnnnnnnnnnnnnnnnnnnnnnnnnnnnnnnnnnnnnnnnnnnnnnnnnnnnnnnnnnnnnnnnnnnnnnnnnnnnnnnnnnnnnnnnnnnnnnnnnnnnnnnnnnnnnnnnnnnnnnnnnnnnnnnnnnnnnnnnnnnnnnnnnnnnnnnnnnnnnnnnnnnnnnnnnnnnnnnnnnnnnnnnnnnnnnnnnnnnnnnnnnnnnnnnnnnnnnnnnnnnnnnnnnnnnnnnnnnnnnnnnnnnnnnnnnnnnnnnnnnnnnnnnnnnnnnnnnnnnnnnnnnnnnnnnnnnnnnnnnnnnnnnnnnnnnnnnnnnnnnnnnnnnnnnnnnnnnnnnnnnnnnnnnnnnnnnnnnnnnnnnnnnnnnnnnnnnnnnnnnnnnnnnnnnnnnnnnnnnnnnnnnnnnnnnnnnnnnnnnnnnnnnnnnnnnnnnnnnnnnnnnnnnnnnnnnnnnnnnnnnnnnnnnnnnnnnnnnnnnnnnnnnnnnnnnnnnnnnnnnnnnnnnnnnnnnnnnnnnnnnnnnnnnnnnnnnnnnnnnnnnnnnnnnnnnnnnnnnnnnnnnnnnnnnnnnnnnnnnnnnnnnnnnnnnnnnnnnnnnnnnnnnnnnnnnnnnnnnnnnnnnnnnnnnnnnnnnnnnnnnnnnnnnnnnnnnnnnnnnnnnnnnnnnnnnnnnnnnnnnnnnnnnnnnnnnnnnnnnnnnnnnnnnnnnnnnnnnnnnnnnnnnnnnnnnnnnnnnnnnnnnnnnnnnnnnnnnnnnnnnnnnnnnnnnnnnnnnnnnnnnnnnnnnnnnnnnnnnnnnnnnnnnnnnnnnnnnnnnnnnnnnnnnnnnnnnnnnnnnnnnnnnnnnnnnnnnnnnnnnnnnnnnnnnnnnnnnnnnnnnnnnnnnnnnnnnnnnnnnnnnnnnnnnnnnnnnnnnnnnnnnnnnnnnnnnnnnnnnnnnnnnnnnnnnnnnnnnnnnnnnnnnnnnnnnnnnnnnnnnnnnnnnnnnnnnnnnnnnnnnnnnnnnnnnnnnnnnnnnnnnnnnnnnnnnnnnnnnnnnnnnnnnnnnnnnnnnnnnnnnnnnnnnnnnnnnnnnnnnnnnnnnnnnnnnnnnnnnnnnnnnnnnnnnnnnnnnnnnnnnnnnnnnnnnnnnnnnnnnnnnnnnnnnnnnnnnnnnnnnnnnnnnnnnnnnnnnnnnnnnnnnnnnnnnnnnnnnnnnnnnnnnnnnnnnnnnnnnnnnnnnnnnnnnnnnnnnnnnnnnnnnnnnnnnnnnnnnnnnnnnnnnnnnnnnnnnnnnnnnnnnnnnnnnnnnnnnnnnnnnnnnnnnnnnnnnnnnnnnnnnnnnnnnnnnnnnnnnnnnnnnnnnnnnnnnnnnnnnnnnnnnnnnnnnnnnnnnnnnnnnnnnnnnnnnnnnnnnnnnnnnnnnnnnnnnnnnnnnnnnnnnnnnnnnnnnnnnnnnnnnnnnnnnnnnnnnnnnnnnnnnnnnnnnnnnnnnnnnnnnnnnnnnnnnnnnnnnnnnnnnnnnnnnnnnnnnnnnnnnnnnnnnnnnnnnnnnnnnnnnnnnnnnnnnnnnnnnnnnnnnnnnnnnnnnnnnnnnnnnnnnnnnnnnnnnnnnnnnnnnnnnnnnnnnnnnnnnnnnnnnnnnnnnnnnnnnnnnnnnnnnnnnnnnnnnnnnnnnnnnnnnnnnnnnnnnnnnnnnnnnnnnnnnnnnnnnnnnnnnnnnnnnnnnnnnnnnnnnnnnnnnnnnnnnnnnnnnnnnnnnnnnnnnnnnnnnnnnnnnnnnnnnnnnnnnnnnnnnnnnnnnnnnnnnnnnnnnnnnnnnnnnnnnnnnnnnnnnnnnnnnnnnnnnnnnnnnnnnnnnnnnnnnnnnnnnnnnnnnnnnnnnnnnnnnnnnnnnnnnnnnnnnnnnnnnnnnnnnnnnnnnnnnnnnnnnnnnnnnnnnnnnnnnnnnnnnnnnnnnnnnnnnnnnnnnnnnnnnnnnnnnnnnnnnnnnnnnnnnnnnnnnnnnnnnnnnnnnnnnnnnnnnnnnnnnnnnnnnnnnnnnnnnnnnnnnnnnnnnnnnnnnnnnnnnnnnnnnnnnnnnnnnnnnnnnnnnnnnnnnnnnnnnnnnnnnnnnnnnnnnnnnnnnnnnnnnnnnnnnnnnnnnnnnnnnnnnnnnnnnnnnnnnnnnnnnnnnnnnnnnnnnnnnnnnnnnnnnnnnnnnnnnnnnnnnnnnnnnnnnnnnnnnnnnnnnnnnnnnnnnnnnnnnnnnnnnnnnnnnnnnnnnnnnnnnnnnnnnnnnnnnnnnnnnnnnnnnnnnnnnnnnnnnnnnnnnnnnnnnnnnnnnnnnnnnnnnnnnnnnnnnnnnnnnnnnnnnnnnnnnnnnnnnnnnnnnnnnnnnnnnnnnnnnnnnnnnnnnnnnnnnnnnnnnnnnnnnnnnnnnnnnnnnnnnnnnnnnnnnnnnnnnnnnnnnnnnnnnnnnnnnnnnnnnnnnnnnnnnnnnnnnnnnnnnnnnnnnnnnnnnnnnnnnnnnnnnnnnnnnnnnnnnnnnnnnnnnnnnnnnnnnnnnnnnnnnnnnnnnnnnnnnnnnnnnnnnnnnnnnnnnnnnnnnnnnnnnnnnnnnnnnnnnnnnnnnnnnnnnnnnnnnnnnnnnnnnnnnnnnnnnnnnnnnnnnnnnnnnnnnnnnnnnnnnnnnnnnnnnnnnnnnnnnnnnnnnnnnnnnnnnnnnnnnnnnnnnnnnnnnnnnnnnnnnnnnnnnnnnnnnnnnnnnnnnnnnnnnnnnnnnnnnnnnnnnnnnnnnnnnnnnnnnnnnnnnnnnnnnnnnnnnnnnnnnnnnnnnnnnnnnnnnnnnnnnnnnnnnnnnnnnnnnnnnnnnnnnnnnnnnnnnnnnnnnnnnnnnnnnnnnnnnnnnnnnnnnnnnnnnnnnnnnnnnnnnnnnnnnnnnnnnnnnnnnnnnnnnnnnnnnnnnnnnnnnnnnnnnnnnnnnnnnnnnnnnnnnnnnnnnnnnnnnnnnnnnnnnnnnnnnnnnnnnnnnnnnnnnnnnnnnnnnnnnnnnnnnnnnnnnnnnnnnnnnnnnnnnnnnnnnnnnnnnnnnnnnnnnnnnnnnnnnnnnnnnnnnnnnnnnnnnnnnnnnnnnnnnnnnnnnnnnnnnnnnnnnnnnnnnnnnnnnnnnnnnnnnnnnnnnnnnnnnnnnnnnnnnnnnnnnnnnnnnnnnnnnnnnnnnnnnnnnnnnnnnnnnnnnnnnnnnnnnnnnnnnnnnnnnnnnnnnnnnnnnnnnnnnnnnnnnnnnnnnnnnnnnnnnnnnnnnnnnnnnnnnnnnnnnnnnnnnnnnnnnnnnnnnnnnnnnnnnnnnnnnnnnnnnnnnnnnnnnnnnnnnnnnnnnnnnnnnnnnnnnnnnnnnnnnnnnnnnnnnnnnnnnnnnnnnnnnnnnnnnnnnnnnnnnnnnnnnnnnnnnnnnnnnnnnnnnnnnnnnnnnnnnnnnnnnnnnnnnnnnnnnnnnnnnnnnnnnnnnnnnnnnnnnnnnnnnnnnnnnnnnnnnnnnnnnnnnnnnnnnnnnnnnnnnnnnnnnnnnnnnnnnnnnnnnnnnnnnnnnnnnnnnnnnnnnnnnnnnnnnnnnnnnnnnnnnnnnnnnnnnnnnnnnnnnnnnnnnnnnnnnnnnnnnnnnnnnnnnnnnnnnnnnnnnnnnnnnnnnnnnnnnnnnnnnnnnnnnnnnnnnnnnnnnnnnnnnnnnnnnnnnnnnnnnnnnnnnnnnnnnnnnnnnnnnnnnnnnnnnnnnnnnnnnnnnnnnnnnnnnnnnnnnnnnnnnnnnnnnnnnnnnnnnnnnnnnnnnnnnnnnnnnnnnnnnnnnnnnnnnnnnnnnnnnnnnnnnnnnnnnnnnnnnnnnnnnnnnnnnnnnnnnnnnnnnnnnnnnnnnnnnnnnnnnnnnnnnnnnnnnnnnnnnnnnnnnnnnnnnnnnnnnnnnnnnnnnnnnnnnnnnnnnnnnnnnnnnnnnnnnnnnnnnnnnnnnnnnnnnnnnnnnnnnnnnnnnnnnnnnnnnnnnnnnnnnnnnnnnnnnnnnnnnnnnnnnnnnnnnnnnnnnnnnnnnnnnnnnnnnnnnnnnnnnnnnnnnnnnnnnnnnnnnnnnnnnnnnnnnnnnnnnnnnnnnnnnnnnnnnnnnnnnnnnnnnnnnnnnnnnnnnnnnnnnnnnnnnnnnnnnnnnnnnnnnnnnnnnnnnnnnnnnnnnnnnnnnnnnnnnnnnnnnnnnnnnnnnnnnnnnnnnnnnnnnnnnnnnnnnnnnnnnnnnnnnnnnnnnnnnnnnnnnnnnnnnnnnnnnnnnnnnnnnnnnnnnnnnnnnnnnnnnnnnnnnnnnnnnnnnnnnnnnnnnnnnnnnnnnnnnnnnnnnnnnnnnnnnnnnnnnnnnnnnnnnnnnnnnnnnnnnnnnnnnnnnnnnnnnnnnnnnnnnnnnnnnnnnnnnnnnnnnnnnnnnnnnnnnnnnnnnnnnnnnnnnnnnnnnnnnnnnnnnnnnnnnnnnnnnnnnnnnnnnnnnnnnnnnnnnnnnnnnnnnnnnnnnnnnnnnnnnnnnnnnnnnnnnnnnnnnnnnnnnnnnnnnnnnnnnnnnnnnnnnnnnnnnnnnnnnnnnnnnnnnnnnnnnnnnnnnnnnnnnnnnnnnnnnnnnnnnnnnnnnnnnnnnnnnnnnnnnnnnnnnnnnnnnnnnnnnnnnnnnnnnnnnnnnnnnnnnnnnnnnnnnnnnnnnnnnnnnnnnnnnnnnnnnnnnnnnnnnnnnnnnnnnnnnnnnnnnnnnnnnnnnnnnnnnnnnnnnnnnnnnnnnnnnnnnnnnnnnnnnnnnnnnnnnnnnnnnnnnnnnnnnnnnnnnnnnnnnnnnnnnnnnnnnnnnnnnnnnnnnnnnnnnnnnnnnnnnnnnnnnnnnnnnnnnnnnnnnnnnnnnnnnnnnnnnnnnnnnnnnnnnnnnnnnnnnnnnnnnnnnnnnnnnnnnnnnnnnnnnnnnnnnnnnnnnnnnnnnnnnnnnnnnnnnnnnnnnnnnnnnnnnnnnnnnnnnnnnnnnnnnnnnnnnnnnnnnnnnnnnnnnnnnnnnnnnnnnnnnnnnnnnnnnnnnnnnnnnnnnnnnnnnnnnnnnnnnnnnnnnnnnnnnnnnnnnnnnnnnnnnnnnnnnnnnnnnnnnnnnnnnnnnnnnnnnnnnnnnnnnnnnnnnnnnnnnnnnnnnnnnnnnnnnnnnnnnnnnnnnnnnnnnnnnnnnnnnnnnnnnnnnnnnnnnnnnnnnnnnnnnngaagggcctttgagggccctcaaaaatatgccggtggatttgtggataacccttgtgcccgagagcgaaaaaggaaggcggcaaaaaagttagatctgaggacacttgacagttttatacatagcagagcgcaaagaacgcgaagaaatacaattcagatctcaccgtagaggcgcaaagttcgcaaagatttttttctggttcttttaaacgcggaacccggaactcggaacccggaacatttttttcaccgcggagacgcagaggtcgcaaaaattttatttcttccgtttaccgttcaccgtttcccgttcctcgttcctcatttctcgttcctcgcattcccccggctactgaccactatccactgccaactacccacttgccactagccactggctgctgcttttctgctcctcaattccgaatccctaattttgaaatgcctgtcctccatagccccttcctgtccgaacaatctgttggcgaaggaggaaccggatttgacattaaaatcggtataatagtgatatggcgatttttgaccataaaaagaaaatgcttgacatcataaataaaaatgttctaatatgatgattgatcaagaaataagcaaaggatcaggagggagcctgaaaaatgggagctgaacagagctataacctgctggaagagaattggattcccgtcctttataacaatggcaaagttgagcgcgtgggaatcaagaaggcgctcatggatgctggcaaaatccgccaaatcgcggcaagcaatcccatggaccgcgtggccatcatccgcttcctgctggcggtgctctactggtgcaaagggaatcctccaagtgatgaagaattaaccaaaatcaaatcattccctgcggatgggtttacgaaactcgatgaaaataaagattgcttcaacctgctgggaaaagaaaaaagattttatcagcaaaaaacttcaaagaaagaatgggcaataacaagcctgctgcaggaaatcccctctggtaacaacttctggcatttgagacattcaacagataagataaatggcctttgctttgcctgctgtgcaatgggtttactgagactgccgatctttagcgttaccagcttgcctgaccttaagaccgggatcaatggcacaccgcctatctatgttattccgtggggcagatcgctgctgaatacccttcaagcaaactgggtgcaatatgggcaacttggagttcccgcatgggtgcaggcggacattcgcccaactatggatgaggatgtgcaaattctaacaggattgaccttattgtcaaggcgcgtctggttacatgatccaattgagaaatcaggagtttgcattagctgcggcgtgagggaaacatccctgatattgagctgtgagtatcaaagctctggcgaactgaaaaatgatcattggaatgatcctcatgttgtctattcgaatgatactccccgaaaatccagcagagcctcagacctttccgcggcaaaaaagttcaggatggaccggccttggccatatttgctcagcaacatgctggaggctggcaaaattggtccgggcatcaggccaatatctctgtttgtcgtcggctttgctaccgacaaggcaaagaacattgatgtttgggaacgaattattgcagtgccatcatcggagatatctctggataccgctaaatccatgattttgcaatggcagcaggaaggcaacctattggataagcgaatcccaagacctgataccgggacgaccgctattattgcttccattcgcccggaagtggaaggcaaggtctccggcaaagtggatgagttgttggccaagggtgaatctgtatgggtagaggccgcccgcgaatatcgccccatgatggctgccttggctcactcgctctctccgggattcaccagcgagtcggtccaaagacggaatcatatcgggaacttgttaccggatatgcggcgtaaaatagaaccacagaaaaaaacgggacggaagaagggaggggaaaagtgactgcgaccgagcaattcatagaagttttgaccgatctgaaaaagggcgacctgggcctgttgcgcacccatgcgggccaagggcttgatgagtcggtggatgggtttgacctgttcgcgggtttgtggtggccgttgcgtcagaaaaaccagcgggctcccaggcgcgaagttgcttggatgattgcaaagctatttgcttattgtccaataaaacaagcagagcgaacagaaggcgaggagttagccgggcaattgcgcaaatgccagccaaacgaggaaaaggagagaaaaagattccagcagaagtttgatagaatgcttcttctaccgcttgaccagatcgaaccggcattgcgatgggcgctcgatcggatcgcctcaagaaatttgaaacttgactgggtaaagctgacggatgacctatccatctggaaacgcgaaaccacccgccttaagtgggcggaacaatttttaaaaatctaaaaaggaggaaagccatgttaattgaaattcacgccattcaaaaccacagcccggcaaatctgaaccgggacgacctgggtgcgcctaagacctgtttttttggtggggtactgcgctcccgcatctccagccagtgcctcaagaggagtatccgtatgagcgatgattttaaaaaattgctcggaggagtccgaacccggcaattggcgaaattgattgctgaaaaggtgacggacaaagacgcaaagaaacgcgccgaaaaaattctcaagctttgcggattcgaaaccaagaagtcaaaaaaagaagaaacagaagaaaccggttcctcgggtgcggataagagcaaaatgctggtctataccacctttgaggcgattgaaaaaatggccacttttttgcaaaaaagcgctggaaaatccgacgaggagttggcaaaggagtttggaaaacttatcagcgaaaatatcgctgtgcccgacatggctcttagcggcaggatgctggaaaccggagtgcttgaagacaccacagtggaagcctctttacaagttgcccatgccatctccacgcatgaggcgcggccagaagtggactactatgtcgccgcggatgacattcccggcgatgatgcgggagcgggctatgtggacgaggcgatgttctcctcggcctgcttttacaaatatttttctattcattgggaaaccctggtcgggaatctgaaggggaataaagaacttgccgcccacacggtcggggcattccttcgtggcgtggcattggctaatcccacgggcaagcaaaatagcttcgccgctcacaatccgcccgatggaatactggtggaagtcaaagacaccccgatcagctatgccaatgcctttgccgacccggtgcccagcaagggcgaccgcgacctgatctcgcagagtatcgctcaactggcccaatacatccacgatctggataatggatacggaaagccgcaaaagcggttctggttctcgcccaatctccgtcttcagttgaaggttgttgaagacaaaaaggagttcgctctcgctgaaaataatctgaagtcattggatgatttaatccccgcagtgatcaaatcaattggttatgactggaaggaggttcaaaaggttatcgtgaaccaacaggtggccccatgagaaacaataccctatttcttaggctggaaggacccctgcaggcatggggaaatcaggaatcaaagtttgtcatccgccggacggctgatgcccctaccaagtccggtgtgatcgggatgctctgcgcggcattgggtgtgtcgcgtccagatgccgcggagaaatggattccaaaactcagtgccctttctatgggcgttcgagttgactcgtcgggcgtgcgctggtgggactatcacaccatcggagcgggaatggacatgcgcattgcggaaagagagggaaagaccaagcccggcgcaatgcttactcggcgggaatatatttgtgatgccagcttccttgtgtccttgcaaggagaaccggaacttattgctgaacttgaggcggcgcttaaaaaccctaaatggacgctctacttggggagaaaatgctgtccgccttcgcgccccctgttggaatatcctgcggaagaatttcccgatttgctcgcggctctcaaattcataccctggagaaagcgccttgaaaatgataaacctcccgaaagcgttgattgcctgcttgactggcagccgacgacggaacaaccagaggctcctgatgatgccttgatttggtatgatgtgcctctaactttcgagccaccttcacatattcccaggtttgtcatccgcaagcaattgagcgtgggcaaggatggcgaagtcaaaatcgccgagaaacccgcacaaagtcgcactccttcaccgctacggccacgggcaaattataccaattccgaatacaaaaagatccgcaaggaaagaattgagggcgaccggcatctttgtgttttctgcaaatctcccgctaccacggttcagcatatcacctatcgtcacgccggtggagacgaacgccttgatgaattgcgttccctttgccggctctgccacgatgccgtcaccatgattgaatacggcatgggaatgggattggatcggatcaatccggaagactcgcaatggcgggatcagattatcaggaagcggaatgagataattgaattccgttcgctggaaacgagacgacggcggctcagccccgaggaggtggaatagcaatgtatctctcctgtcttttaataaatgttggcgataatcccgaccgtccaagacctggaaggttgtggcttaggaacctctaccatgttcaccagcgtctttgcatggcgttcccgtcttcggaacaaaagggaaaagatccatcgttcataaaatcgtttgacccgcaaggcttccagcatgtgcatggcgagcgaaatgaacagcaggcttttctttttcgcattgacccacaacccggttcatcacccataattatcgtgcaatcagcaaggaagcccgattgggactatgcctttcaaaattctccattccttgccgcaatgccggaggtaaaatctttcaatccgcaatttgatccgaatcaacccctgcgatttcgcctcctggctaacccggtgaggaaagccaccgcaaaatcccttgatgccaacggaaaaccggtggatgaaaaatggatcggcagccgaattccggttccaaatgataagctgccggattggctcgcgaggaaagccgagcatggcggtttccaggttgagcatttagaggcggtccaggctggctatatttatatcaaaggccatgccgctgacaaagaaggcaaacgcgaaaagagcaaccgcctgttttctgccaagtttgaaggcatccttgaagttactaaacccggcgatttccaaaatacactgattcacggcatcgggccggccaaggcctttggcttcgggctgttgagtgtggcaaaggtaaaatgaagaatctccatatattgccaaagttttccgaccggtggagctatttgtatcttgagcatggcaagctggacaaagaggactccgggttggtccttcataccaaggatggcgacattccggtcccgattgaccagttgggactgcttatgctcgggcccgggacttctctcagtcatcgcgccatgcagaccttggcggaaaacaactgtctggtctgttggaccggggagcagggcgtaaggatgtatgcgcacagcaccggcgggacgcatttttcccggagatttttgaaccaggcccgaatgttttgcgatgatgctctccggctcaaagtgatccggcggttgtatgcgaaaaggtttgagtatgaactttccgaagactttaccattgaacagatccggggcctggagggccagcgggtgaggaacacctacaagcttatttcggacagtgtcggcatcccctggaatggcaggtgttatgaccaggacgattgggataatgccgatccggtcaaccgggcgctgtccgcggccaattcctgtctgtatggcatctgtcacgcggccatcctttccgcgggatattcgccggccatcggcttcatccataccggaaaaatgctcagcttcgtctatgacatcgccgacctctataagactgaaatcaccatcccgctcgcgtttaccgtggcctcggaggggagcgaggaaaccgaacggagggcaaggcttaagtgcagagatgttttccaccaaagcaaattgatggaacgcatcctgccggacattgcggaggtgctggatgctcgtgatgatcttggagaatgccccggagagtttgaagggagaattgtcacgctggctgatcgagccgaagtcgggcgtgttccttggcaaccccaacgcccgggtcagggacgaactctggaagatggcggtccaaaaaagccggaagggagcggtggtccagatctggagtgaacataacccgcagggatataaataccgggtccacggagaccccaaaaggcagtttgtggactttgaggggattgcattactgctttataaagcagagaaattgtgcaagcaggataaaaaggtctaggttctttgacatatcgggttgactaaaagtagggaatgggaacagagcttatctattagcggggtttgtattcactcttaaatacgccagcttggtattttccccacgcgcgtgggggtgaaccagacgcccagcaacaacttgccgatctcataacattttccccacgcgcgtgggggtgaaccgcaaccgaggaatggcggggatggcctccaagattttccccacgcgcgtgggggtgaaccgggtataaatgatctatctaattggtggaattcattttccccacgcgcgtgggggtgaaccgtccgctatgtttccggatcgctctttcaacgcattttccccacgcgcgtgggggtgaaccgatcggcgattacgggatggtccgggccgggtcattttccccacgcgcgtgggggtgaaccgtggtcgctgaattttactcagttccctaccacattttccccacgcgcgtgggggtgaaccgatattcgtgggcgtgctggaggaacttgagtaattttccccacgcgcgtgggggtgaaccgcaagggggtctccgaccaagagcccgggggtgattttccccacgcgcgtgggggtgaaccgaaaattggccagttcatcacatgcaggcctgaattttccccacgcgcgtgggggtgaaccgttcatttgcattcctgccgccatacattggttattttccccacgcgcgtgggggtgaaccggtcaattgggcggtgccgccgcttaaccactgattttccccacgcgcgtgggggtgaaccgaacagaaccaagcccgggtccggacacaggccattttccccacgcgcgagggggtgaaccgagcaagccgcgcccgaagcccgcccggaactaattttccccacgcgcgtgggggtgaaccgaatttatagaatcctgaatttgcctcatttatattttccccacgcgcgtgggggtgaaccgaacatccgcaacacgcttaaaaattaagcaggcaagagtctgctctgccagttctgatctgcggtttttatgatctttgcggtgaagattgatttgaattctctgtgtcctcggtgtcatcggtggatggaaattgaatttatttgtccgcagccaagagtgtctgcgcccctgattttctttgcgtgctttgcgaactttggtgcgccaggaagtttggctgatctgatgatctgaaaggaggtcatactggaattgttcgttcgccagttagcaaggcaggcggttgggggag
